(19) United States
(12) Patent Application Publication
(10) Pub. No.: US 2024/0207196 A1
(43) Pub. Date: Jun. 27, 2024

(54) COMPOSITIONS OF GLYCOPROTEIN PARTICLES

(71) Applicant: Scribe Therapeutics Inc., Alameda, CA (US)

(72) Inventors: Benjamin OAKES, El Cerrito, CA (US); Gayathri VIJAYAKUMAR, Oakland, CA (US)

(21) Appl. No.: 18/568,029

(22) PCT Filed: Jun. 7, 2022
(86) PCT No.: PCT/US2022/032577

§ 371 Date: Dec. 7, 2023

Related U.S. Application Data
(60) Provisional application No. 63/208,930, filed on Jun. 9, 2021.

(51) Int. Cl. A61K 9/51; A61K 48/00; C12N 7/00; C12N 9/22; C12N 15/11

(52) U.S. Cl. CPC A61K 9/5184; A61K 48/0033; A61K 48/0041; C12N 7/00; C12N 9/22; C12N 15/11; C12N 2310/20; C12N 2760/20223; C12N 2800/80

(57) ABSTRACT

Provided herein are glycoprotein particles comprising one or more glycoproteins, or fragments thereof that enhance targeting of a particle to a cell or tissue. A glycoprotein particle as provided herein may be used for any application, including therapeutic and diagnostic treatments.

### CROSS REFERENCE TO RELATED APPLICATIONS

[0001] This application claims priority to U.S. Provisional Patent Application No. 62/208,930, filed Jun. 9, 2021, the contents of which are incorporated by reference in their entirety.

### INCORPORATION BY REFERENCE OF SEQUENCE LISTING

[0002] This application contains a Sequence Listing which has been submitted in ASCII format via EFS-WEB and is hereby incorporated by reference in its entirety. Said ASCII copy, created on Jun. 5, 2022 is named SCRB_037_01WO_SeqList_ST25.txt and is 5.67 MB in size.

### BACKGROUND

[0003] Targeted delivery of therapeutic payloads to particular cells or tissues of the body generally requires complex systems involving the incorporation of a targeting modality. Even with highly selective targeting modalities, such as monoclonal antibodies, the selectivity of the system for the target cells or tissues is not absolute, and non-specific delivery and off-target toxicity may result. Thus, there is a need for additional compositions and methods to target therapeutic payloads to particular cell and tissue types.

### SUMMARY

[0004] The present disclosure provides glycoprotein particles, i.e., particles comprising a viral glycoprotein, to selectively target cells and tissues. As provided herein, a glycoprotein particle comprises a particle and a glycoprotein, wherein the glycoprotein is any one of the sequences of SEQ ID NOS: 1-224, 281-284, or 286-573 as set forth in Table 1, a sequence comprising at least 70%, at least 80%, at least 90%, at least 95%, at least 96%, at least 97%, at least 98%, or at least 99% identity thereto, or a fragment thereof. In some embodiments, the glycoprotein particle comprises a glycoprotein consisting of any one of SEQ ID NOS: 1-224, 281-284, or 286-573 as set forth in Table 1. In some embodiments, the glycoprotein fragment is a virion surface domain.

[0005] In some embodiments, the glycoprotein particle comprises a microparticle, a nanoparticle, or one or more of fullerenes, metals, biological polymers, dendrimers, quantum dots, lipids, nucleic acid vectors, and viral structural proteins.

[0006] In some embodiments, the glycoprotein particle comprises a polymeric nanoparticle, e.g., a nanocapsule or a nanosphere. In some embodiments, the glycoprotein particle comprises a polymer micelle. In some embodiments, the glycoprotein particle comprises a particle that is non-toxic and/or biodegradable. In some embodiments, the glycoprotein particle comprises a lipid-based particle.

[0007] In some embodiments, the glycoprotein particle comprises a virus-like particle (VLP). In some embodiments, the glycoprotein particle comprises a VLP derived from a virus selected from the group consisting of retrovirus, adeno-associated virus (AAV), adenovirus, and herpes simplex virus. In some embodiments, the retrovirus is an Orthoretrovirinae virus or a Spumaretrovirinae virus. In some embodiments, the Orthoretrovirinae virus is selected from the group consisting of an Alpharetrovirus, Betaretrovirus, Deltaretrovirus, Epsilonretrovirus, Gammaretrovirus, and Lentivirus. In some embodiments, the Spumaretrovirinae virus is selected from the group consisting of Bovispumavirus, Equispumavirus, Felispumavirus, Prosimiispumavirus, Simiispumavirus, or Spumavirus.

[0008] In some embodiments, the glycoprotein particle comprises an exosome. In some embodiments, the glycoprotein is expressed in a host cell and is trafficked to the host cell membrane prior to formation of the glycoprotein particle. In some embodiments, the glycoprotein particle is a lipid nanoparticle (LNP). In some embodiments, the glycoprotein is incorporated into a membrane of the glycoprotein particle.

[0009] In some embodiments, the glycoprotein particle comprises an organic polymer-based particle. In some embodiments, the glycoprotein particle comprises an inorganic nanoparticle. In some embodiments, the glycoprotein is conjugated to the surface of the glycoprotein particle. In some embodiments, the glycoprotein particle conjugation comprises covalent attachment or non-covalent attachment.

[0010] In some embodiments, glycoprotein particle comprises a payload. In some embodiments, inclusion of the glycoprotein in the glycoprotein particles enhances delivery of the payload to a cell or tissue compared to an equivalent particle that does not comprise the glycoprotein. In some embodiments, the payload comprises a protein, nucleic acid, small molecule, or combinations thereof. In some embodiments, the payload is a therapeutic payload. In some embodiments, delivery of the therapeutic payload to a cell or a tissue of a subject treats a disease or disorder in the subject.

[0011] In some embodiments, the therapeutic payload comprises a protein or an oligonucleotide. In some embodiments, the oligonucleotide comprises a sequence encoding a protein. In some embodiments, the protein comprises a cytokine, growth factor, interleukin, enzyme, receptor, microprotein, hormone, RNAse, DNAse, blood clotting factor, anticoagulant, bone morphogenetic protein, engineered protein scaffold, thrombolytics, antibody, antibody fragment, antibody fusion protein, transcription factor, viral interferon antagonist, tick protein, or engineered therapeutic protein.

[0012] In some embodiments, the oligonucleotide comprises a single-stranded antisense oligonucleotide (ASO), double-stranded RNA interference (RNAi) molecule, DNA aptamer, RNA aptamer, microRNA, ribozyme, RNA decoy, or circular RNA.

[0013] In some embodiments, the payload is a diagnostic payload.

[0014] In some embodiments, the payload comprises a gene editing system. In some embodiments. the gene editing system comprises a Class 2, Type II CRISPR/Cas system, a Class 2, Type V CRISPR/Cas system, a zinc finger nuclease or a TALEN. In some embodiments, the Class 2, Type II CRISPR/Cas system comprises Cas9. In some embodiments, the Class 2, Type V CRISPR/Cas system comprises one or more of CasX, Cas12a (Cpf1), Cas12b (C2c1), Cas12c (C2c3), Cas12d (CasY), Cas12e (CasX), Cas12f, Cas12g, Cas12h, Cas12i, Cas12j, Cas12k, Cas14, and/or CasΦ.

[0015] In some embodiments, the Class 2, Type V CRISPR/Cas system comprises a gene editing pair comprising a CasX protein comprising an amino acid sequence with at least 90% identity to any one of SEQ ID NOS: 574-944, or as set forth in Table 2, and a guide RNA (gRNA) comprising a scaffold comprising a nucleic acid sequence with at least 90% identity to any one of SEQ ID NOS: 945-1141, or as set forth in Table 3. In some embodiments, the payload comprises a gene editing pair comprising a CasX protein of any one of SEQ ID NOS: 574-944, or as set forth in Table 2, and a guide RNA comprising a scaffold of any one of SEQ ID NOS: 945-1141, or as set forth in Table 3. In some embodiments, the gRNA further comprises a targeting sequence linked to the 3′ end of the gRNA scaffold sequence.

[0016] In some embodiments, provided herein is a pharmaceutical composition comprising a glycoprotein particle and a pharmaceutically acceptable carrier, diluent, or excipient.

[0017] In some embodiments, provided herein is a method of treating a subject in need thereof, comprising administering to a subject in need thereof, a glycoprotein particle or a pharmaceutical composition thereof. In some embodiments, the subject has a disease or disorder selected from the group consisting of cancer, an immunoregulatory disease, a pulmonary disease or disorder, a cardiovascular disease, an infectious disease, a genetic disease or disorder, a neurological disease or disorder, an endocrine disease or disorder, a metabolic disease or disorder, an intestinal disease or disorder, a mental illness, a sexually transmitted disease, a gynecological disease, an urogenital disease, a skin disease, or an ocular disease. In some embodiments, administration of the glycoprotein particle or pharmaceutical composition reduces a sign or a symptom of the disease or disorder.

### BRIEF DESCRIPTION OF THE DRAWINGS

[0018] The novel features of the invention are set forth with particularity in the appended claims. A better understanding of the features and advantages of the present invention will be obtained by reference to the following detailed description that sets forth illustrative embodiments, in which the principles of the invention are utilized, and the accompanying drawings of which:

[0019] FIG. 1 shows the results of percentage editing in mouse tdTomato neural progenitor cells (NPCs) with glycoprotein particles comprising viral-like particles (VLPs) comprising serial concentrations of the vesicular stomatitis virus glycoprotein (VSV-G), and a bald negative control VLP, wherein bald refers to a VLP lacking a glycoprotein, as described in Example 1.

[0020] FIG. 2 shows the results of size distributions and viral titer comparisons of glycoprotein particles comprising lentivirus VLPs comprising VSV-G and rabies glycoproteins, and a bald negative control lentivirus, as described in Example 1.

[0021] FIG. 3 depicts plasmids utilized in the creation of example glycoprotein particles comprising VLPs, with protease cleavage sites indicated by arrows, as described in Example 2.

[0022] FIG. 4 is a graph of editing results of example glycoprotein particles comprising VLPs having various incorporated glycoproteins, and a bald negative control, where bald refers to a VLP) lacking a glycoprotein, used to edit tdTomato in NPCs as measured by the number of particles (titer) added to treat the cells, as described in Example 2.

[0023] FIG. 5 is a graph of editing results with glycoprotein particles comprising VLPs having various incorporated glycoproteins, and a bald negative control VLP, used to edit tdTomato in NPCs as measured by the volume of VLPs added to treat the cells (μl of virus, x-axis), as described in Example 2.

[0024] FIG. 6 is a graph of editing results with glycoprotein particles comprising VLPs having various incorporated glycoproteins, and a bald negative control VLP, used to edit tdTomato in NPCs using 2 different volumes of VLPs to treat the cells, as described in Example 2. Glycoprotein constructs are provided in Table 4.

[0025] FIG. 7 is a scatterplot of EC₅₀ values for editing results with glycoprotein particles comprising VLPs having various incorporated glycoproteins, and a bald negative control, used to edit tdTomato in NPCs, as described in Example 2. The EC₅₀ for the different constructs was determined using P24 enzyme-linked immunosorbent assay (ELISA)-based titers.

[0026] FIG. 8 is a bar chart showing the titers for glycoprotein particles comprising VLPs, and a VLP bald control, as determined by P24 ELISA and plotted as VLP per ml, as described in Example 2. All the constructs showed comparable levels of production.

[0027] FIG. 9 is a bar chart of editing data showing the fold change in EC₅₀ values over the base control glycoprotein (pGP2; set to 1.0) for the glycoprotein particles comprising VLPs, pseudotyped with different glycoproteins, and a VLP bald control, as described in Example 2.

[0028] FIG. 10 depicts the plasmids utilized in the creation of an example glycoprotein particle comprising a VLP, with protease cleavage sequence sites indicated by arrows, as described in Example 2.

[0029] FIG. 11 depicts the plasmids utilized in the creation of an example glycoprotein particle comprising a VLP, with protease cleavage sequence sites indicated by arrows, as described in Example 2.

[0030] FIG. 12 is a graph of editing results of glycoprotein particles comprising VLPs based on HIV (V168) or Alphavirus (V44 and V102) having various incorporated glycoproteins used to edit tdTomato in NPCs in terms of volume of viral-like particles added to treat the cells, as described in Example 3.

[0031] FIG. 13 is a bar graph of editing results with glycoprotein particles comprising VLPs based on HIV (V168) or Alphavirus (V44 and V102) having various incorporated glycoproteins used to edit tdTomato in NPCs treated with the indicated volume of viral-like particles, as described in Example 3.

[0032] FIG. 14 is a bar graph of editing results with glycoprotein particles comprising VLPs based on HIV (V168) or Alphavirus (V44 and V102) having various incorporated glycoproteins used to edit tdTomato in NPCs treated with the indicated volume of viral-like particles, as described in Example 3.

[0033] FIG. 15 is a graph of editing results with glycoprotein particles comprising VLPs based on HIV (V168) having various incorporated glycoproteins (or bald negative control) used to edit tdTomato in NPCs across a range of titered volumes of viral-like particles added to treat the cells, as described in Example 3.

[0034] FIG. 16 is a bar graph showing the titers for glycoprotein particles comprising VLPs based on HIV (V168) having various incorporated glycoproteins, determined by P24 ELISA and plotted as VLPs/ml, as described in Example 3. All the constructs showed comparable levels of production.

[0035] FIG. 17 is a graph of editing results with glycoprotein particles comprising VLPs based on HIV (V168) having incorporated glycoproteins from rabies variants used to edit tdTomato in NPCs across a range of volumes of VLPs added to treat the cells, as described in Example 3.

[0036] FIG. 18 is a bar graph of editing results with glycoprotein particles comprising VLPs based on HIV (V168) having incorporated glycoproteins from rabies variants used to edit tdTomato in NPCs across the indicated volume of viral-like particles added to treat the cells, as described in Example 3.

[0037] FIG. 19 is a graph of editing results with glycoprotein particles comprising VLPs based on HIV (V168) having incorporated glycoproteins from Paramyxoviridae, Orthomyxoviridae, and Flaviviridae used to edit tdTomato (TDT) in NPCs across a range of volumes of VLPs added to treat the cells, as described in Example 3.

[0038] FIG. 20 is a bar graph of editing results with glycoprotein particles comprising VLPs based on HIV (V168) having various incorporated glycoproteins used to edit tdTomato in NPCs across the indicated volumes of VLPs added to treat the cells, as described in Example 3.

[0039] FIG. 21 is a bar graph showing the titers for the glycoprotein particles comprising viral-like constructs based on HIV (V168) having various incorporated glycoproteins, determined by P24 ELISA and plotted as VLP/ml, as described in Example 3. All the constructs showed comparable levels of production.

[0040] FIG. 22 is a bar graph of editing results with glycoprotein particles comprising VLPs based on HIV having various incorporated glycoproteins used to edit tdTomato in mouse NPCs, as described in Example 4.

[0041] FIG. 23 is a bar graph of editing results with glycoprotein particles comprising VLPs based on HIV having various incorporated glycoproteins used to edit the beta 2 microglobulin (B2M) in human NPCs, as described in Example 4.

[0042] FIG. 24 is a bar graph of editing results with glycoprotein particles comprising VLPs based on HIV having various incorporated glycoproteins used to edit the B2M locus in human astrocytes, as described in Example 4.

[0043] FIG. 25 is a bar graph of editing results with glycoprotein particles comprising VLPs based on HIV having various incorporated glycoproteins used to edit the B2M locus in human Jurkat cells, as described in Example 4.

### DETAILED DESCRIPTION

[0044] Provided herein are glycoprotein particles, i.e., particles comprising a glycoprotein, for the delivery of any payload, including proteins, nucleic acids, small molecules, or combinations thereof, to selectively target cells and/or tissues. As provided herein, the glycoprotein particles of the present disclosure improve cell and tissue tropism, providing targeted delivery of a payload to a cell or tissue of interest. Glycoprotein particle delivery of a payload as provided herein may be for any application, including therapeutic and diagnostic applications. Glycoprotein particles of the present disclosure may comprise any delivery particle including, but not limited to, viral-like particles, lipid nanoparticles, liposomes, exosomes, organic polymer-based particles, inorganic nanoparticles, or any combination thereof.

### I. Definitions

[0045] The practice of the present invention employs, unless otherwise indicated, conventional techniques of immunology, biochemistry, chemistry, molecular biology, microbiology, cell biology, genomics and recombinant DNA, which can be found in such standard textbooks as Molecular Cloning: A Laboratory Manual, 3rd Ed. (Sambrook et al., Cold Spring Harbor Laboratory Press 2001); Short Protocols in Molecular Biology, 4th Ed. (Ausubel et al. eds., John Wiley & Sons 1999); Protein Methods (Bollag et al., John Wiley & Sons 1996); Nonviral Vectors for Gene Therapy (Wagner et al. eds., Academic Press 1999); Viral Vectors (Kaplift & Loewy eds., Academic Press 1995); Immunology Methods Manual (I. Lefkovits ed., Academic Press 1997); and Cell and Tissue Culture: Laboratory Procedures in Biotechnology (Doyle & Griffiths, John Wiley & Sons 1998), the disclosures of which are incorporated herein by reference.

[0046] Where a range of values is provided, it is understood that endpoints are included and that each intervening value, to the tenth of the unit of the lower limit unless the context clearly dictates otherwise, between the upper and lower limit of that range and any other stated or intervening value in that stated range, is encompassed. The upper and lower limits of these smaller ranges may independently be included in the smaller ranges, and are also encompassed, subject to any specifically excluded limit in the stated range. Where the stated range includes one or both of the limits, ranges excluding either or both of those included limits are also included.

[0047] Unless defined otherwise, all technical and scientific terms used herein have the same meaning as commonly understood by one of ordinary skill in the art to which this invention belongs. All publications mentioned herein are incorporated herein by reference to disclose and describe the methods and/or materials in connection with which the publications are cited.

[0048] It must be noted that as used herein and in the appended claims, the singular forms “a,” “an,” and “the” include plural referents unless the context clearly dictates otherwise.

[0049] It will be appreciated that certain features of the disclosure, which are, for clarity, described in the context of separate embodiments, may also be provided in combination in a single embodiment. In other cases, various features of the disclosure, which are, for brevity, described in the context of a single embodiment, may also be provided separately or in any suitable sub-combination. It is intended that all combinations of the embodiments pertaining to the disclosure are specifically embraced by the present disclosure and are disclosed herein just as if each and every combination was individually and explicitly disclosed. In addition, all sub-combinations of the various embodiments and elements thereof are also specifically embraced by the present disclosure and are disclosed herein just as if each and every such sub-combination was individually and explicitly disclosed herein.

[0050] As used herein, the terms “identity” and “identical,” when referring to a comparison of two sequences, refers to the percentage of exact matching residues in an alignment of a sequence provided herein to a reference sequence, such as an alignment generated by a BLAST algorithm or other alignment algorithms known in the art. Identity may be calculated based on an alignment of a full length sequence provided herein and a full length reference sequence. Identity may also be calculated based on a partial alignment of a sequence provided herein and a reference sequence, if the reference sequence is longer than a sequence provided herein. Identity may also be calculated based on a partial alignment of a sequence provided herein and a reference sequence, if the reference sequence is shorter than a sequence provided herein. Thus, when aligning two sequences, according to the aforementioned, a query sequence “shares at least x % identity to” a subject sequence if in the alignment of the two sequences, at least x % (rounded down) of the residues in the subject sequence are aligned as an exact match to a corresponding residue in the query sequence, wherein the numerator is the number of exact matches and the denominator is the length of the query sequence. In some embodiments, the denominator may alternatively be the length of the query sequence minus any gaps of two or more non-matching residues. Where the subject sequence has variable positions (e.g., residues denoted X), an alignment to any residue in the query sequence is counted as a match.

[0051] The terms “polynucleotide” and “nucleic acid,” used interchangeably herein, refer to a polymeric form of nucleotides of any length, either ribonucleotides or deoxyribonucleotides. Thus, terms “polynucleotide” and “nucleic acid” encompass single-stranded DNA; double-stranded DNA; multi-stranded DNA; single-stranded RNA; double-stranded RNA; multi-stranded RNA; genomic DNA; cDNA; DNA-RNA hybrids; and a polymer comprising purine and pyrimidine bases or other natural, chemically or biochemically modified, non-natural, or derivatized nucleotide bases.

[0052] The terms “polypeptide,” and “protein” are used interchangeably herein, and refer to a polymeric form of amino acids of any length, which can include coded and non-coded amino acids, chemically or biochemically modified or derivatized amino acids, and polypeptides having modified peptide backbones. The term includes fusion proteins, including, but not limited to, fusion proteins with a heterologous amino acid sequence.

[0053] The term “naturally-occurring” or “unmodified” or “wild type” as used herein as applied to a nucleic acid, a polypeptide, a cell, or an organism, refers to a nucleic acid, polypeptide, cell, or organism that is found in nature.

[0054] As used herein, a “mutation” refers to an insertion, deletion, substitution, duplication, or inversion of one or more amino acids or nucleotides as compared to a wild-type or reference amino acid sequence or to a wild-type or reference nucleotide sequence.

[0055] The term “antibody,” as used herein, encompasses various antibody structures, including but not limited to monoclonal antibodies, polyclonal antibodies, multispecific antibodies (e.g., bispecific antibodies), nanobodies, single domain antibodies such as VHH antibodies, and antibody fragments so long as they exhibit the desired antigen-binding activity or immunological activity. Antibodies represent a large family of molecules that include several types of molecules, such as IgD, IgG, IgA, IgM and IgE.

[0056] An “antibody fragment” refers to a molecule other than an intact antibody that comprises a portion of an intact antibody and that binds the antigen to which the intact antibody binds. Examples of antibody fragments include but are not limited to Fv, Fab, Fab′, Fab′-SH, F(ab′)2, diabodies, single chain diabodies, linear antibodies, a single domain antibody, a single domain camelid antibody, single-chain variable fragment (scFv) antibody molecules, and multispecific antibodies formed from antibody fragments.

[0057] As used herein, “treatment” or “treating,” are used interchangeably herein and refer to an approach for obtaining beneficial or desired results, including but not limited to a therapeutic benefit and/or a prophylactic benefit. By therapeutic benefit is meant eradication or amelioration of the underlying disorder or disease being treated. A therapeutic benefit can also be achieved with the eradication or amelioration of one or more of the symptoms or an improvement in one or more clinical parameters associated with the underlying disease such that an improvement is observed in the subject, notwithstanding that the subject may still be afflicted with the underlying disorder.

[0058] The terms “therapeutically effective amount” and “therapeutically effective dose”, as used herein, refer to an amount of a drug or a biologic, alone or as a part of a composition, that is capable of having any detectable, beneficial effect on any symptom, aspect, measured parameter or characteristics of a disease state or condition when administered in one or repeated doses to a subject such as a human or an experimental animal. Such effect need not be absolute to be beneficial.

[0059] As used herein, “administering” means a method of giving a dosage of a compound (e.g., a composition of the disclosure) or a composition (e.g., a pharmaceutical composition) to a subject.

[0060] As used herein a “subject” is a mammal. Mammals include, but are not limited to, domesticated animals, non-human primates, humans, dogs, rabbits, mice, rats and other rodents.

[0061] All publications, patents, and patent applications mentioned in this specification are herein incorporated by reference to the same extent as if each individual publication, patent, or patent application was specifically and individually indicated to be incorporated by reference.

### II. Glycoproteins

[0062] The present disclosure provides glycoprotein particles, i.e., particles comprising a viral glycoprotein, or fragment thereof, for the delivery of any payload, including proteins, nucleic acids, small molecules, or combinations thereof, to selectively target cells and tissues. In some embodiments, delivery of a payload by a glycoprotein particle may be for a therapeutic and/or diagnostic treatment of a subject in need thereof.

[0063] As used herein, the term “tropism” refers to preferential binding and/or entry of a particle (e.g. glycoprotein particle of the disclosure) to certain cells or tissue type(s) and/or preferential interaction with the cell surface of cells of that cell or tissue type that facilitates binding and/or entry of the particle or its payload to the certain cell or tissue type. When the payload of the particle is a nucleic acid encoding protein or RNA sequence, entry can be followed by expression (e.g., transcription and, optionally, translation) of sequences of the nucleic acid. In many enveloped viruses, viral glycoproteins carry out binding to cellular virus receptors and membrane fusion events that mediate entry of the virus into the host cell. Viral glycoproteins thus confer cell or tissue tropism on the viruses from which they are derived. Without wishing to be bound by theory, the glycoproteins described herein, when incorporated into a particle can confer cell or tissue tropism similar to their role in the native virus.

[0064] The term “tropism factor” as used herein refers to components integrated into the surface of a glycoprotein particle that provides tropism for a certain cell or tissue type. Examples of tropism factors that may be used in a glycoprotein particle of the disclosure include glycoproteins, or fragments thereof, as well as antibody fragments (e.g., scFv, nanobodies, linear antibodies, etc.), receptors, and ligands to target cell receptors or cell surface markers.

[0065] A glycoprotein for use in a glycoprotein particle of the disclosure refers to an envelope virus glycoprotein, or a fragment of a glycoprotein comprising a virion surface domain. Without being held to any theory or mechanism, native glycosylated viral proteins bind preferentially to specific host cell receptor proteins, conferring cell and tissue specific tropism to a virus. Glycoproteins are a major component of the outermost surface of enveloped viruses, and mediate binding of the virus to the host cell. Thus, a glycoprotein particle as provided herein is a particle that comprises a viral glycoprotein that may confer the cell and tissue specific tropism of the virus from which the viral glycoprotein was derived to the glycoprotein particle. In some embodiments, the glycoprotein particle comprises a full-length glycosylated protein, e.g., one or more glycoproteins whose sequences are disclose in Table 1. In other embodiments, the glycoprotein particle comprises a fragment of a glycoprotein comprising a virion surface domain.

[0066] Glycans (oligosaccharides) are covalently attached (in a process known as glycosylation) to viral glycoprotein precursors either during or after translation of the glycoprotein precursor in a host cell to create a glycoprotein. Without wishing to be bound by theory, it is thought that glycoprotein tropism is conferred by the virion surface domain of the glycoprotein and the covalently attached glycan. In some embodiments, the glycoprotein particle comprises a glycoprotein fragment comprising the virion surface domain and including the glycosylation amino acid site. Virion surface domains and glycosylation sites of the glycoproteins in Table 1 may be determined by one of skill in the art, e.g., for example with protein databases or using sequence comparison databases. For example, www.uniprot.org provides the domains and glycosylation sites of known proteins: the virion surface domain (SEQ ID NO: 1143) of the single-pass transmembrane VSV-G glycoprotein (SEQ ID NO: 1) is from amino acid 17 to amino acid 474 of the protein, and glycosylation occurs on amino acid 340.

[0067] In other embodiments, alignment of an unknown glycoprotein amino acid sequence to a known glycoprotein amino acid sequence may be used to determine the virion surface domain. The person of ordinary skill in the art will be able to use sequence alignment, e.g. using alignment tools such as with www.blast.ncbi.nlm.nih.gov/Blast.cgi, to align a first glycoprotein with an unknown virion domain and/or glycosylation site to a second glycoprotein of single pass transmembrane sequence whose virion domain and/or glycosylation site are known, thereby determining the unknown virion domain and/or glycosylation site of the first glycoprotein. For example, a single pass transmembrane glycoprotein may be aligned with the VSV-G glycoprotein amino acid sequence, or other single pass transmembrane glycoprotein sequences, to determine the virion surface domain of a single-pass transmembrane glycoprotein.

[0068] In some embodiments, a glycoprotein particle comprises the virion surface domain (SEQ ID NO: 1147) of the single pass transmembrane MARV glycoprotein (SEQ ID NO: 91); the virion surface domain (SEQ ID NO: 1151) of the single pass transmembrane COCV glycoprotein (SEQ ID NO: 86); and/or the virion surface domain (SEQ ID NO: 1155) of the single pass transmembrane rabies glycoprotein (SEQ ID NO: 21).

[0069] In some embodiments, a glycoprotein particle comprises one or more virion surface domains of the multipass WEEV glycoprotein (SEQ ID NO: 64), i.e., SEQ ID NOS: 1159, 1162, and 1165.

[0070] In some embodiments, a glycoprotein particle comprises the virion surface domain of measles H (SEQ ID NO: 111), i.e., SEQ ID NO: 1169. In some embodiments, a glycoprotein particle comprises the virion surface domain of measles F (SEQ ID NO: 110), i.e., SEQ ID NO: 1173.

[0071] In some embodiments, a glycoprotein particle comprises a glycoprotein sequence comprising a cleavage site, e.g., an enzymatic or photosensitive linker, integrated into the amino acid sequence to result in a glycoprotein particle comprising a fragment of the original glycoprotein. In some embodiments, a glycoprotein particle comprises a glycoprotein fragment that results from non-specific cleavage. In some embodiments, a glycoprotein particle comprises a glycoprotein fragment encoded by a nucleic acid sequence.

[0072] As provided herein, glycoprotein particles of the present disclosure may comprise glycoproteins, or virion surface domain fragments thereof, derived from envelope virus. Envelope viruses include but are not limited to: Argentine hemorrhagic fever virus, Australian bat virus, Autographa californica multiple nucleopolyhedrovirus, Avian leukosis virus, baboon endogenous virus, Bolivian hemorrhagic fever virus, Borna disease virus, Breda virus, Bunyamwera virus, Chandipura virus, Chikungunya virus, Crimean-Congo hemorrhagic fever virus, Dengue fever virus, Duvenhage virus, Eastern equine encephalitis virus, Ebola hemorrhagic fever virus, Ebola Zaire virus, enteric adenovirus, Ephemerovirus, Epstein-Bar virus (EBV), European bat virus 1, European bat virus 2, Fug Synthetic gP Fusion, Gibbon ape leukemia virus, Hantavirus, Hendra virus, hepatitis A virus, hepatitis B virus, hepatitis C virus, hepatitis D virus, hepatitis E virus, hepatitis G Virus (GB virus C), herpes simplex virus type 1, herpes simplex virus type 2, human cytomegalovirus (HHV5), human foamy virus, human herpesvirus (HHV), human Herpesvirus 7, human herpesvirus type 6, human herpesvirus type 8, human immunodeficiency virus 1 (HIV-1), human metapneumovirus, human T-lymphotro pic virus 1, influenza A, influenza B, influenza C virus, Japanese encephalitis virus, Kaposi's sarcoma-associated herpesvirus (HHV8), Kaysanur Forest disease virus, La Crosse virus, Lagos bat virus, Lassa fever virus, lymphocytic choriomeningitis virus (LCMV), Machupo virus, Marburg hemorrhagic fever virus, measles virus, Middle eastern respiratory syndrome-related coronavirus, Mokola virus, Moloney murine leukemia virus, monkey pox, mouse mammary tumor virus, mumps virus, murine gammaherpesvirus, Newcastle disease virus, Nipah virus, Nipah virus, Norwalk virus, Omsk hemorrhagic fever virus, papilloma virus, parvovirus, pseudorabies virus, Quaranfil virus, rabies virus, RD114 Endogenous Feline Retrovirus, respiratory syncytial virus (RSV), Rift Valley fever virus, Ross River virus, rRotavirus, Rous sarcoma virus, rubella virus, Sabia-associated hemorrhagic fever virus, SARS-associated coronavirus (SARS-COV), Sendai virus, Tacaribe virus, Thogotovirus, tick-borne encephalitis causing virus, varicella zoster virus (HHV3), varicella zoster virus (HHV3), variola major virus, variola minor virus, Venezuelan equine encephalitis virus, Venezuelan hemorrhagic fever virus, vesicular stomatitis virus (VSV), Vesiculovirus, West Nile virus, western equine encephalitis virus, and Zika Virus. Non-limiting examples of envelope virus glycoprotein amino acid sequences are provided in Table 1.

TABLE 1
Exemplary Glycoprotein sequences

| | SEQ |
|---|---|
| Virus | ID NO |
| Vesicular Stomatitis Virus (VSV-G) | 1 |
| Human Immunodeficiency Virus | 2 |
| Avian leukosis virus | 3 |
| Rous Sarcoma Virus | 4 |
| Mouse mammary tumor virus | 5 |
| Human T-lymphotropic virus 1 (HTLV1) | 6 |
| RD114 Endogenous Feline Retrovirus | 7 |
| Gibbon ape leukemia virus (GALV) | 8 |
| Moloney Murine leukemia virus | 9 |
| Baboon Endogenous Virus (BABV) | 10 |
| Human Foamy Virus | 11 |
| Psuedorabies virus | 12 |
| Psuedorabies virus | 13 |
| Psuedorabies virus | 14 |
| Psuedorabies virus | 15 |
| Herpes simplex virus 1 (HHV1) | 16 |
| Herpes simplex virus 1 (HHV1) | 17 |
| Herpes simplex virus 1 (HHV1) | 18 |
| Herpes simplex virus 1 (HHV1) | 19 |
| Hepatitis C Virus | 20 |
| Rabies Virus | 21 |
| Mokola Virus | 22 |
| Measles Virus | 23 |
| Measles Virus | 24 |
| Ebola Zaire Virus | 25 |
| Dengue | 26 |
| Zika virus | 27 |
| West Nile Virus | 28 |
| Japanese Encephalitis Virus | 29 |
| Hepatitis G Virus | 30 |
| Mumps Virus F | 31 |
| Mumps Virus HN | 32 |
| Sendai Virus F | 33 |
| Sendai Virus HN | 34 |
| AcMNPV gp64 | 35 |
| Ross River Virus | 36 |
| Codon optimized rabies virus | 37 |
| Rabies virus (strain Nishigahara RCEH) (RABV) | 38 |
| Rabies virus (strain India) (RABV) | 39 |
| Rabies virus (strain CVS-11) (RABV) | 40 |
| Rabies virus (strain ERA) (RABV) | 41 |
| Rabies virus (strain SAD B19) (RABV) | 42 |
| Rabies virus (strain Vnukovo-32) (RABV) | 43 |
| Rabies virus (strain Pasteur vaccins/PV) (RABV) | 44 |
| Rabies virus (strain PM1503/AVO1) (RABV) | 45 |
| Rabies virus (strain China/DRV) (RABV) | 46 |
| Rabies virus (strain China/MRV) (RABV) | 47 |
| Rabies virus (isolate Human/Algeria/1991) (RABV) | 48 |
| Rabies virus (strain HEP-Flury) (RABV) | 49 |
| Rabies virus (strain silver-haired bat-associated) | 50 |
| (RABV) (SHBRV) | |
| HSV2 gB | 51 |
| HSV2 gD | 52 |
| HSV2 gH | 53 |
| HSV2 gL | 54 |
| Varicella gB | 55 |
| Varicella gK | 56 |
| Varicella gH | 57 |
| Varicella gL | 58 |
| Hepatitis B gL | 59 |
| Hepatitis B gM | 60 |
| Hepatitis B gS | 61 |
| Eastern equine encephalitis virus (EEEV) | 62 |
| Venezuelan equine encephalitis viruses (VEEV) | 63 |
| Western equine encephalitis virus (WEEV) | 64 |
| Semliki Forest virus | 65 |
| Sindbis virus | 66 |
| Chikungunya virus (CHIKV) | 67 |
| Bornavirus BoDV-1 | 68 |
| Tick-borne encephalitis virus (TBEV) | 69 |
| Usutu virus | 70 |
| St. Louis encephalitis virus | 71 |
| Yellow fever virus | 72 |
| Dengue virus 2 | 73 |
| Dengue virus 3 | 74 |
| Dengue virus 4 | 75 |
| Murray Valley encephalitis virus (MVEV) | 76 |
| Powassan virus | 77 |
| H5 Hemagglutinin | 78 |
| H7 Hemagglutinin | 79 |
| N1 Neuraminidase | 80 |
| Canine Distemper Virus | 81 |
| VSAV | 82 |
| ABVV | 83 |
| CARV | 84 |
| CHPV | 85 |
| COCV | 86 |
| VSIV | 87 |
| ISFV | 88 |
| JURV | 89 |
| MSPV | 90 |
| MARV | 91 |
| MORV | 92 |
| VSNJV | 93 |
| PERV | 94 |
| PIRYV | 95 |
| RADV | 96 |
| YBV | 97 |
| VSV CEN AM - 94GUB | 98 |
| VSV South America 85CLB | 99 |
| Nipah Virus | 100 |
| Nipah Virus | 101 |
| Hendra Virus | 102 |
| Hendra Virus | 103 |
| Newcastle disease virus | 104 |
| Newcastle disease virus | 105 |
| RSV f0 | 106 |
| RSV G | 107 |
| Bovine respiratory syncytial virus (strain Rb94) | 108 |
| (BRS) | |
| Murine pneumonia virus (strain 15) (MPV) | 109 |
| Measles virus (strain Edmonston) (MeV) (Subacute | 110 |
| sclerose panencephalitis virus) | |
| Measles virus (strain Edmonston B) (MeV) | 111 |
| (Subacute sclerose panencephalitis virus) | |
| Human respiratory syncytial virus B (strain B1) | 112 |
| Rinderpest virus (strain RBOK) (RDV) | 113 |
| Simian virus 41 (SV41) | 114 |
| Mumps virus (strain Miyahara vaccine) (MuV) | 115 |
| Canine distemper virus (strain Onderstepoort) (CDV) | 116 |
| Human respiratory syncytial virus A (strain Long) | 117 |
| Sendai virus (strain Fushimi) (SeV) | 118 |
| Human respiratory syncytial virus A (strain RSS-2) | 119 |
| Rinderpest virus (strain RBT1) (RDV) | 120 |
| Measles virus (strain Leningrad-16) (MeV) | 121 |
| (Subacute sclerose panencephalitis virus) | |
| Human parainfluenza 2 virus (HPIV-2) | 122 |
| Avian metapneumovirus (isolate Canada goose/ | 123 |
| Minnesota/15a/2001) (AMPV) | |
| Phocine distemper virus (PDV) | 124 |
| Sendai virus (strain Harris) (SeV) | 125 |
| Bovine parainfluenza 3 virus (BPIV-3) | 126 |
| Measles virus (strain Ichinose-B95a) (MeV) | 127 |
| (Subacute sclerose panencephalitis virus) | |
| Human parainfluenza 2 virus (strain Toshiba) | 128 |
| (HPIV-2) | |
| Newcastle disease virus (strain B1-Hitchner/47) | 129 |
| (NDV) | |
| Measles virus (strain Yamagata-1) (MeV) | 130 |
| (Subacute sclerose panencephalitis virus) | |
| Measles virus (strain IP-3-Ca) (MeV) (Subacute | 131 |
| sclerose panencephalitis virus) | |
| Measles virus (strain Edmonston-AIK-C vaccine) | 132 |
| (MeV) (Subacute sclerose panencephalitis virus) | |
| Turkey rhinotracheitis virus (TRTV) | 133 |
| Human parainfluenza 2 virus (strain Greer) | 134 |
| (HPIV-2) | |
| Hendra virus (isolate Horse/Autralia/Hendra/1994) | 135 |
| Human metapneumovirus (strain CAN97-83) (HMPV) | 136 |
| Bovine respiratory syncytial virus (strain | 137 |
| Copenhagen) (BRS) | |
| Sendai virus (strain Z) (SeV) (Sendai virus (strain | 138 |
| HVJ)) | |
| Human parainfluenza 3 virus (strain Wash/47885/57) | 139 |
| (HPIV-3) (Human parainfluenza 3 virus (strain NIH | |
| 47885)) | |
| Mumps virus (strain SBL-1) (MuV) | 140 |
| Measles virus (strain Edmonston-Zagreb vaccine) | 141 |
| (MeV) (Subacute sclerose panencephalitis virus) | |
| Human parainfluenza 1 virus (strain C39) (HPIV-1) | 142 |
| Sendai virus (strain Hamamatsu) (SeV) | 143 |
| Mumps virus (strain RW) (MuV) | 144 |
| Infectious hematopoietic necrosis virus (strain | 145 |
| Oregon69) (IHNV) | |
| Drosophila melanogaster sigma virus (isolate | 146 |
| Drosophila/USA/AP30/2005) (DMelSV) | |
| Hirame rhabdovirus (strain Korea/CA 9703/1997) | 147 |
| (HIRRV) | |
| Sonchus yellow net virus (SYNV) | 148 |
| European bat lyssavirus 1 (strain Bat/Germany/ | 149 |
| RV9/1968) (EBLV1) | |
| Lagos bat virus (LBV) | 150 |
| Duvenhage virus (DUVV) | 151 |
| West Caucasian bat virus (WCBV) | 152 |
| European bat lyssavirus 2 (strain Human/Scotland/ | 153 |
| RV1333/2002) (EBLV2) | |
| Irkut virus (IRKV) | 154 |
| Tupaia virus (isolate Tupaia/Thailand/—/1986) | 155 |
| (TUPV) | |
| Rabies virus (strain ERA) (RABV) | 156 |
| Ovine respiratory syncytial virus (strain WSU | 157 |
| 83-1578) (ORSV) | |
| Human respiratory syncytial virus A (strain | 158 |
| rsb5857) | |
| Piry virus (PIRYV) | 159 |
| Human respiratory syncytial virus A (strain | 160 |
| rsb6190) | |
| Rabies virus (strain SAD B19) (RABV) | 161 |
| Australian bat lyssavirus (isolate Human/AUS/ | 162 |
| 1998) (ABLV) | |
| Rabies virus (strain Vnukovo-32)( RABV) | 163 |
| Aravan virus (ARAV) | 164 |
| Sigma virus | 165 |
| Viral hemorrhagic septicemia virus (strain 07-71) | 166 |
| (VHSV) | |
| Rabies virus (strain Pasteur vaccins/PV) (RABV) | 167 |
| Bovine respiratory syncytial virus (strain Rb94) | 168 |
| (BRS) | |
| Tibrogargan virus (strain CS132) (TIBV) | 169 |
| Infectious hematopoietic necrosis virus (strain | 170 |
| Round Butte) (IHNV) | |
| Human respiratory syncytial virus B (strain 18537) | 171 |
| Adelaide River virus (ARV) | 172 |
| Australian bat lyssavirus (isolate Bat/AUS/1996) | 173 |
| (ABLV) | |
| Bovine ephemeral fever virus (strain BB7721) | 174 |
| (BEFV) | |
| Isfahan virus (ISFV) | 175 |
| Rabies virus (strain silver-haired bat-associated) | 176 |
| (RABV) (SHBRV) | |
| Snakehead rhabdovirus (SHRV) | 177 |
| Infectious hematopoietic necrosis virus (strain | 178 |
| WRAC) (IHNV) | |
| Zaire ebolavirus (strain Kikwit-95) (ZEBOV) | 179 |
| (Zaire Ebola virus) | |
| Sudan ebolavirus (strain Maleo-79) (SEBOV) (Sudan | 180 |
| Ebola virus) | |
| Tai Forest ebolavirus (strain Cote d'Ivoire-94) | 181 |
| (TAFV) (Cote d'Ivoire Ebola virus) | |
| Reston ebolavirus (strain Philippines-96) (REBOV) | 182 |
| (Reston Ebola virus) | |
| Lake Victoria marburgvirus (strain Angola/2005) (MARV) | 183 |
| Zaire ebolavirus (strain Eckron-76) (ZEBOV) (Zaire | 184 |
| Ebola virus) | |
| Reston ebolavirus (strain Reston-89) (REBOV) (Reston | 185 |
| Ebola virus) | |
| Tai Forest ebolavirus (strain Cote d'Ivoire-94) | 186 |
| (TAFV) (Cote d'Ivoire Ebola virus) | |
| Lake Victoria marburgvirus (strain Ozolin-75) (MARV) | 187 |
| (Marburg virus (strain South Africa/Ozolin/1975)) | |
| Zaire ebolavirus (strain Mayinga-76) (ZEBOV) (Zaire | 188 |
| Ebola virus) | |
| Lake Victoria marburgvirus (strain Popp-67) (MARV) | 189 |
| (Marburg virus (strain West Germany/Popp/1967)) | |
| Sudan ebolavirus (strain Boniface-76) (SEBOV) (Sudan | 190 |
| Ebola virus) | |
| Reston ebolavirus (strain Reston-89) (REBOV) (Reston | 191 |
| Ebola virus) | |
| Sudan ebolavirus (strain Human/Uganda/Gulu/2000) | 192 |
| (SEBOV) (Sudan Ebola virus) | |
| Zaire ebolavirus (strain Gabon-94) (ZEBOV) (Zaire | 193 |
| Ebola virus) | |
| Reston ebolavirus (strain Reston-89) (REBOV) | 194 |
| (Reston Ebola virus) | |
| Simian virus 41 (SV41) | 195 |
| Newcastle disease virus (strain D26/76) (NDV) | 196 |
| Xenotropic MuLV-related virus (isolate VP42) (XMRV) | 197 |
| Xenotropic MuLV-related virus (isolate VP62) (XMRV) | 198 |
| Simian immunodeficiency virus (isolate F236/smH4) | 199 |
| (SIV-sm) (Simian immunodeficiency virus sooty mangabey | |
| monkey) | |
| Simian immunodeficiency virus (isolate Mm251) (SIV- | 200 |
| mac) (Simian immunodeficiency virus rhesus monkey) | |
| Simian immunodeficiency virus (isolate GB1) (SIV-mnd) | 201 |
| (Simian immunodeficiency virus mandrill) | |
| Simian immunodeficiency virus (isolate Mm142-83) | 202 |
| (SIV-mac) (Simian immunodeficiency virus rhesus monkey) | |
| Simian immunodeficiency virus (isolate MB66) (SIV-cpz) | 203 |
| (Chimpanzee immunodeficiency virus) | |
| Simian immunodeficiency virus (isolate EK505) (SIV-cpz) | 204 |
| (Chimpanzee immunodeficiency virus) | |
| Feline immunodeficiency virus (strain UK2) (FIV) | 205 |
| Feline immunodeficiency virus (strain San Diego) (FIV) | 206 |
| Feline immunodeficiency virus (isolate Wo) (FIV) | 207 |
| Feline immunodeficiency virus (isolate Petaluma) (FIV) | 208 |
| Feline immunodeficiency virus (strain UK8) (FIV) | 209 |
| Feline immunodeficiency virus (strain UT-113) (FIV) | 210 |
| Mayoro Virus | 211 |
| Barmah Forest Virus | 212 |
| Aura virus | 213 |
| Bebaru Virus | 214 |
| Middleburg virus | 215 |
| Mucambo virus | 216 |
| Ndumu Virus | 217 |
| O'nyong-nyong virus | 218 |
| Pixuna virus | 219 |
| Tonate Virus | 220 |
| Trocara virus | 221 |
| Whataroa virus | 222 |
| Bussuquara virus | 223 |
| Jugra virus | 224 |
| MeV-G | 281 |
| MeV-F | 282 |
| Nipah-G | 283 |
| Nipah-F | 284 |
| Queensland carbovirus | 286 |
| Southwest carbovirus | 287 |
| Mammalian 1 orthobornavirus | 288 |
| Mammalian 2 orthobornavirus | 289 |
| Passeriform 1 orthobornavirus | 290 |
| Passeriform 2 orthobornavirus | 291 |
| Psittaciform 1 orthobornavirus | 292 |
| Waterbird 1 orthobornavirus | 293 |
| Elapid 1 orthobornavirus | 294 |
| Lloviu cuevavirus | 295 |
| Lloviu cuevavirus | 296 |
| Mengla dianlovirus | 297 |
| Bombali ebolavirus | 298 |
| Bundibugyo ebolavirus | 299 |
| Reston ebolavirus | 300 |
| Sudan ebolavirus | 301 |
| Tai Forest ebolavirus | 302 |
| Zaire ebolavirus | 303 |
| Marburg marburgvirus | 304 |
| Xilang striavirus | 305 |
| San Jacinto virus | 306 |
| Sierra Nevada virus | 307 |
| Soybean cyst nematode nyami-like virus | 308 |
| Formica fusca virus 1 | 309 |
| Avian metaavulavirus 2 | 310 |
| Avian metaavulavirus 2 | 311 |
| Avian metaavulavirus 5 | 312 |
| Avian metaavulavirus 5 | 313 |
| Avian metaavulavirus 6 | 314 |
| Avian metaavulavirus 6 | 315 |
| Avian metaavulavirus 7 | 316 |
| Avian metaavulavirus 7 | 317 |
| Avian metaavulavirus 8 | 318 |
| Avian metaavulavirus 8 | 319 |
| Avian metaavulavirus 10 | 320 |
| Avian metaavulavirus 10 | 321 |
| Avian metaavulavirus 11 | 322 |
| Avian metaavulavirus 11 | 323 |
| Avian metaavulavirus 14 | 324 |
| Avian metaavulavirus 14 | 325 |
| Avian metaavulavirus 15 | 326 |
| Avian metaavulavirus 15 | 327 |
| Avian metaavulavirus 20 | 328 |
| Avian metaavulavirus 20 | 329 |
| Avian orthoavulavirus 1 | 330 |
| Avian orthoavulavirus 1 | 331 |
| Avian orthoavulavirus 9 | 332 |
| Avian orthoavulavirus 9 | 333 |
| Avian orthoavulavirus 12 | 334 |
| Avian orthoavulavirus 12 | 335 |
| Avian orthoavulavirus 13 | 336 |
| Avian orthoavulavirus 13 | 337 |
| Avian orthoavulavirus 16 | 338 |
| Avian orthoavulavirus 16 | 339 |
| Avian orthoavulavirus 17 | 340 |
| Avian orthoavulavirus 17 | 341 |
| Avian paraavulavirus 3 | 342 |
| Avian paraavulavirus 3 | 343 |
| Avian paraavulavirus 4 | 344 |
| Avian paraavulavirus 4 | 345 |
| Synodus synodonvirus | 346 |
| Synodus synodonvirus | 347 |
| Salmo aquaparamyxovirus | 348 |
| Salmo aquaparamyxovirus | 349 |
| Reptilian ferlavirus | 350 |
| Reptilian ferlavirus | 351 |
| Cedar henipavirus | 352 |
| Cedar henipavirus | 353 |
| Ghanaian bat henipavirus | 354 |
| Ghanaian bat henipavirus | 355 |
| Hendra henipavirus | 356 |
| Hendra henipavirus | 357 |
| Mojiang henipavirus | 358 |
| Mojiang henipavirus | 359 |
| Nipah henipavirus | 360 |
| Nipah henipavirus | 361 |
| Beilong jeilongvirus | 362 |
| Beilong jeilongvirus | 363 |
| Jun jeilongvirus | 364 |
| Jun jeilongvirus | 365 |
| Lophuromys jeilongvirus 1 | 366 |
| Lophuromys jeilongvirus 1 | 367 |
| Lophuromys jeilongvirus 2 | 368 |
| Lophuromys jeilongvirus 2 | 369 |
| Myodes jeilongvirus | 370 |
| Myodes jeilongvirus | 371 |
| Tailam jeilongvirus | 372 |
| Tailam jeilongvirus | 373 |
| Canine morbillivirus | 374 |
| Canine morbillivirus | 375 |
| Cetacean morbillivirus | 376 |
| Cetacean morbillivirus | 377 |
| Feline morbillivirus | 378 |
| Feline morbillivirus | 379 |
| Measles morbillivirus | 380 |
| Measles morbillivirus | 381 |
| Phocine morbillivirus | 382 |
| Phocine morbillivirus | 383 |
| Rinderpest morbillivirus | 384 |
| Rinderpest morbillivirus | 385 |
| Small ruminant morbillivirus | 386 |
| Small ruminant morbillivirus | 387 |
| Mossman narmovirus | 388 |
| Mossman narmovirus | 389 |
| Myodes narmovirus | 390 |
| Myodes narmovirus | 391 |
| Nariva narmovirus | 392 |
| Nariva narmovirus | 393 |
| Tupaia narmovirus | 394 |
| Tupaia narmovirus | 395 |
| Bovine respirovirus 3 | 396 |
| Bovine respirovirus 3 | 397 |
| Caprine respirovirus 3 | 398 |
| Caprine respirovirus 3 | 399 |
| Human respirovirus 1 | 400 |
| Human respirovirus 1 | 401 |
| Human respirovirus 3 | 402 |
| Human respirovirus 3 | 403 |
| Murine respirovirus | 404 |
| Murine respirovirus | 405 |
| Porcine respirovirus 1 | 406 |
| Porcine respirovirus 1 | 407 |
| Squirrel respirovirus | 408 |
| Squirrel respirovirus | 409 |
| Salem salemvirus | 410 |
| Salem salemvirus | 411 |
| Human orthorubulavirus 2 | 412 |
| Human orthorubulavirus 2 | 413 |
| Human orthorubulavirus 4 | 414 |
| Human orthorubulavirus 4 | 415 |
| Mammalian orthorubulavirus 5 | 416 |
| Mammalian orthorubulavirus 5 | 417 |
| Mapuera orthorubulavirus | 418 |
| Mapuera orthorubulavirus | 419 |
| Mumps orthorubulavirus | 420 |
| Mumps orthorubulavirus | 421 |
| Porcine orthorubulavirus | 422 |
| Porcine orthorubulavirus | 423 |
| Simian orthorubulavirus | 424 |
| Simian orthorubulavirus | 425 |
| Achimota pararubulavirus 1 | 426 |
| Achimota pararubulavirus 1 | 427 |
| Achimota pararubulavirus 2 | 428 |
| Achimota pararubulavirus 2 | 429 |
| Menangle pararubulavirus | 430 |
| Menangle pararubulavirus | 431 |
| Sosuga pararubulavirus | 432 |
| Sosuga pararubulavirus | 433 |
| Teviot pararubulavirus | 434 |
| Teviot pararubulavirus | 435 |
| Tioman pararubulavirus | 436 |
| Tioman pararubulavirus | 437 |
| Tuhoko pararubulavirus 1 | 438 |
| Tuhoko pararubulavirus 1 | 439 |
| Tuhoko pararubulavirus 2 | 440 |
| Tuhoko pararubulavirus 2 | 441 |
| Tuhoko pararubulavirus 3 | 442 |
| Tuhoko pararubulavirus 3 | 443 |
| Cynoglossus cynoglossusvirus | 444 |
| Cynoglossus cynoglossusvirus | 445 |
| Hoplichthys hoplichthysvirus | 446 |
| Avian metapneumovirus | 447 |
| Avian metapneumovirus | 448 |
| Human metapneumovirus | 449 |
| Human metapneumovirus | 450 |
| Bovine orthopneumovirus | 451 |
| Bovine orthopneumovirus | 452 |
| Human orthopneumovirus | 453 |
| Human orthopneumovirus | 454 |
| Murine orthopneumovirus | 455 |
| Murine orthopneumovirus | 456 |
| Arboretum almendravirus | 457 |
| Menghai almendravirus | 458 |
| Puerto Almendras almendravirus | 459 |
| Santabarbara arurhavirus | 460 |
| Xiburema arurhavirus | 461 |
| Bahia barhavirus | 462 |
| Muir barhavirus | 463 |
| Caligus caligrhavirus | 464 |
| Lepeophtheirus caligrhavirus | 465 |
| Salmonlouse caligrhavirus | 466 |
| Curionopolis curiovirus | 467 |
| Iriri curiovirus | 468 |
| Itacaiunas curiovirus | 469 |
| Rochambeau curiovirus | 470 |
| Adelaide River ephemerovirus | 471 |
| Berrimah ephemerovirus | 472 |
| Bovine fever ephemerovirus | 473 |
| Hayes ephemerovirus | 474 |
| Kent ephemerovirus | 475 |
| Kimberley ephemerovirus | 476 |
| Koolpinyah ephemerovirus | 477 |
| Kotonkan ephemerovirus | 478 |
| Obodhiang ephemerovirus | 479 |
| Puchong ephemerovirus | 480 |
| Yata ephemerovirus | 481 |
| Flanders hapavirus | 482 |
| Gray Lodge hapavirus | 483 |
| Hart Park hapavirus | 484 |
| Holmes hapavirus | 485 |
| Joinjakaka hapavirus | 486 |
| Kamese hapavirus | 487 |
| La Joya hapavirus | 488 |
| Landjia hapavirus | 489 |
| Manitoba hapavirus | 490 |
| Marco hapavirus | 491 |
| Mosqueiro hapavirus | 492 |
| Mossuril hapavirus | 493 |
| Ord River hapavirus | 494 |
| Parry Creek hapavirus | 495 |
| Wongabel hapavirus | 496 |
| Barur ledantevirus | 497 |
| Bughendera ledantevirus | 498 |
| Fikirini ledantevirus | 499 |
| Fukuoka ledantevirus | 500 |
| Kanyawara ledantevirus | 501 |
| Kern Canyon ledantevirus | 502 |
| Keuraliba ledantevirus | 503 |
| Kolente ledantevirus | 504 |
| Kumasi ledantevirus | 505 |
| Le Dantec ledantevirus | 506 |
| Mount Elgon bat ledantevirus | 507 |
| Nkolbisson ledantevirus | 508 |
| Oita ledantevirus | 509 |
| Vaprio ledantevirus | 510 |
| Wuhan ledantevirus | 511 |
| Yongjia ledantevirus | 512 |
| Lonestar lostrhavirus | 513 |
| Aravan lyssavirus | 514 |
| Australian bat lyssavirus | 515 |
| Bokeloh bat lyssavirus | 516 |
| Duvenhage lyssavirus | 517 |
| European bat 1 lyssavirus | 518 |
| European bat 2 lyssavirus | 519 |
| Gannoruwa bat lyssavirus | 520 |
| Ikoma lyssavirus | 521 |
| Irkut lyssavirus | 522 |
| Khujand lyssavirus | 523 |
| Lagos bat lyssavirus | 524 |
| Lleida bat lyssavirus | 525 |
| Mokola lyssavirus | 526 |
| Rabies lyssavirus | 527 |
| Shimoni bat lyssavirus | 528 |
| Taiwan bat lyssavirus | 529 |
| West Caucasian bat lyssavirus | 530 |
| Culex ohlsrhavirus | 531 |
| Ohlsdorf ohlsrhavirus | 532 |
| Anguillid perhabdovirus | 533 |
| Perch perhabdovirus | 534 |
| Sea trout perhabdovirus | 535 |
| Minto sawgrhavirus | 536 |
| Sawgrass sawgrhavirus | 537 |
| Capitata sigmavirus | 538 |
| Drosophila affinis sigmavirus | 539 |
| Chaco sripuvirus | 540 |
| sripur sripuvirus | 541 |
| Charleville sripuvirus | 542 |
| Garba sunrhavirus | 543 |
| Kwatta sunrhavirus | 544 |
| Sunguru sunrhavirus | 545 |
| Walkabout sunrhavirus | 546 |
| Bas-Congo tibrovirus | 547 |
| Beatrice Hill tibrovirus | 548 |
| Coastal Plains tibrovirus | 549 |
| Ekpoma 1 tibrovirus | 550 |
| Ekpoma 2 tibrovirus | 551 |
| Sweetwater Branch tibrovirus | 552 |
| Tibrogargan tibrovirus | 553 |
| Durham tupavirus | 554 |
| Klamath tupavirus | 555 |
| Tupaia tupavirus | 556 |
| Alagoas vesiculovirus | 557 |
| Carajas vesiculovirus | 558 |
| Chandipura vesiculovirus | 559 |
| Cocal vesiculovirus | 560 |
| Indiana vesiculovirus | 561 |
| Isfahan vesiculovirus | 562 |
| Jurona vesiculovirus | 563 |
| Malpais Spring vesiculovirus | 564 |
| Maraba vesiculovirus | 565 |
| Morreton vesiculovirus | 566 |
| New Jersey vesiculovirus | 567 |
| Perinet vesiculovirus | 568 |
| Piry vesiculovirus | 569 |
| Radi vesiculovirus | 570 |
| Yug Bogdanovac vesiculovirus | 571 |
| Zahedan zarhavirus | 572 |
| Reptile sunshinevirus 1 | 573 |

[0073] In some embodiments, a glycoprotein particle of the disclosure comprises a glycoprotein comprising an amino acid sequence of SEQ ID NOS: 1-224, 281-284, and 286-573 as set forth in Table 1, or a sequence having at least 70%, at least 80%, at least 85%, at least 90%, at least 95%, at least 96%, at least 97%, at least 98%, at least 99% sequence identity thereto. In some embodiments, a glycoprotein particle of the disclosure comprises a glycoprotein comprising an amino acid sequence of SEQ ID NOS: 1-224, 281-284, and 286-573 as set forth in Table 1.

[0074] In some embodiments, a glycoprotein particle of the disclosure comprises a glycoprotein fragment comprising a virion surface domain of a glycoprotein of SEQ ID NOS: 1-224, 281-284, and 286-573 as set forth in Table 1, or a sequence having at least 70%, at least 80%, at least 85%, at least 90%, at least 95%, at least 96%, at least 97%, at least 98%, at least 99%, sequence identity thereto. In some embodiments, a glycoprotein particle of the disclosure comprises a glycoprotein fragment comprising a virion surface domain of a glycoprotein of SEQ ID NOS: 1-224, 281-284, and 286-573 as set forth in Table 1.

[0075] In some embodiments, a glycoprotein particle of the disclosure comprises a combination of two or more full-length glycoproteins to confer tropism of the particle to a target cell. In some embodiments, a glycoprotein particle of the disclosure comprises a combination of two or more glycoprotein fragments to confer tropism of the particle to a target cell. In some embodiments, a glycoprotein particle of the disclosure comprises a combination of one or more full-length glycoproteins and one or more glycoprotein fragments to confer tropism of the particle to a target cell.

### III. Particles

[0076] The disclosure provides glycoprotein particles comprising viral-like particles, lipid nanoparticles, liposomes, exosomes, organic polymer-based particles, inorganic nanoparticles, or any combination thereof. A glycoprotein particle as provided herein is designed to deliver one or more payloads to a target cell or tissue.

### Viral-Like Particles (VLP)

[0077] In some embodiments, a glycoprotein particle of the disclosure comprises a viral-like particle (VLP), wherein the VLP is a non-replicating, self-assembling, non-naturally occurring multicomponent structure comprising viral proteins and polyproteins, such as, but not limited to, a capsid, coat, shell, and/or a lipid layer surrounding the VLP derived from the host packaging cell.

[0078] In some embodiments, the VLP is derived from a retrovirus, adeno-associated virus (AAV), lentivirus, adenovirus, or herpes simplex virus. In some embodiments, the VLP components may be selected from a Retroviridae virus, e.g. an Orthoretrovirinae virus or a Spumaretrovirinae virus. In some embodiments, the Orthoretrovirinae virus is selected from the group consisting of an Alpharetrovirus, Betaretrovirus, Deltaretrovirus, Epsilonretrovirus, Gammaretrovirus, and Lentivirus. In some embodiments, the Spumaretrovirinae virus is selected from the group consisting of Bovispumavirus, Equispumavirus, Felispumavirus, Prosimiispumavirus, Simiispumavirus, or Spumavirus.

[0079] In some embodiments, a glycoprotein particle comprising a VLP is capable of self-assembling when one or more nucleic acids encoding the components of the VLP and the glycoprotein are introduced into a eukaryotic host packaging cell and are expressed. A payload may also be expressed in the host cell and encapsidated within the VLP upon self-assembly. Exemplary embodiments are provided in the Examples, and shown in FIGS. 3, 10, and 11.

[0080] Exemplary VLPs are known in the art, and are described in WO2021113772A1, the contents of which are incorporated by reference in their entirety herein.

[0081] In some embodiments, the VLP is derived from a retrovirus, or comprises retroviral proteins. The major structural component of retroviruses is the polyprotein Gag, which also typically contain protease cleavage sites that, upon action by the viral protease, processes the Gag into subcomponents that, in the case of the replication of the source virus, then self-assemble in the host cell to make the core inner shell of the virus. The expression of Gag alone is sufficient to mediate the assembly and release of viral-like particles (VLPs) from host cells. Gag proteins from all retroviruses contain an N-terminal membrane-binding matrix (MA) domain, a capsid (CA) domain (with two subdomains), and a nucleocapsid (NC) domain that are structurally similar across retroviral genera but differ greatly in sequence. Outside these core domains, Gag proteins vary among retroviruses, and other linkers and domains may be present (Shur, F., et al. The Structure of Immature Virus-Like Rous Sarcoma Virus Gag Particles Reveals a Structural Role for the plO Domain in Assembly. J Virol. 89(20): 10294 (2015)). The assembly pathway of Gag into immature particles in the host cell is mediated by interactions between MA (which is responsible for targeting Gag polyprotein to the plasma membrane), between NC and RNA, and between CA domains (which, in the context of the present disclosure, can assemble into a VLP capsid). For most retrovirus genera, assembly takes place on the plasma membrane, but for betaretroviruses the particles are assembled in the cytoplasm and then transported to the plasma membrane. In the context of the retroviruses, concomitant with, or shortly after, particle release, cleavage of Gag by the viral protease (PR) gives rise to separate MA, CA, and NC proteins, inducing a rearrangement of the internal viral structure, with CA forming the shell of the mature viral core. Full proteolytic cleavage of Gag into its individual domains is necessary for virus infectivity for the native viruses. However, it has been discovered that for self-assembly of VLP within a host cell comprising retroviral components that are then capable of being taken up by target cells and delivering the therapeutic payload, the VLP does not require cleavage of Gag; hence the omission of a protease and cleavage sites is optional.

[0082] The Retroviridae family of viruses have different subfamilies, including Orthoretrovirinae, Spumaretrovirinae, and unclassified Retroviridae, all of which are envisaged giving rise to components of the VLP of the instant disclosure. Many retroviruses cause serious diseases in humans, other mammals, and birds. Human retroviruses include Human Immunodeficiency Virus 1 (HIV-1) and HIV-2, the cause of the disease AIDS, and human T-lymphotropic virus (HTLV) also cause disease in humans. The subfamily Orthoretrovirinae include the genera Alpharetrovirus, Betaretrovirus, Deltaretrovirus, Epsilonretrovirus, Gammaretrovirus, and Lentivirus. Members of Alpharetrovirus, including Avian leukosis virus and Rous sarcoma virus, can cause sarcomas, tumors, and anemia of wild and domestic birds. Examples of Betaretrovirus include mouse mammary tumor virus, Mason-Pfizer monkey virus, and enzootic nasal tumor virus. Examples of Deltaretrovirus include the bovine leukemia virus and the human T-lymphotropic viruses. Members of Epsilonretrovirus include Walleye dermal sarcoma virus, and Walleye epidermal hyperplasia virus 1 and 2. Members of Gammaretrovirus include murine leukemia virus, Maloney murine leukemia virus, and feline leukemia virus, as well as viruses that infect other animal species. Lentivirus is a genus of retroviruses that cause chronic and deadly diseases, including HIV-1 and HIV-2, the cause of the disease AIDS, and also includes Simian immunodeficiency virus. The subfamily Spumaretrovirinae include the genera Bovispumavirus, Equispumavirus, Felispumavirus, Prosimiispumavirus, Simiispumavirus, and Spumavirus. Members of the Retroviridae have provided valuable research tools in molecular biology, and, in the context of the present disclosure, can used in the generation of VLP. The retroviral-derived structural components of VLP can be derived from each of the genera of Retroviridae, and that the resulting VLP are capable self-assembly in a host cell and encapsidating (or encompassing) therapeutic payloads.

[0083] In some embodiments, the VLP are pseudotyped, which as used herein, refers to viral envelope proteins in a viral-like particle that have been substituted with those of another virus possessing preferable characteristics, e.g., preferable tropism. For example, HIV can be pseudotyped with vesicular stomatitis virus G-protein (VSV-G) envelope proteins, which allows HIV to infect a wider range of cells.

[0084] In some embodiments, the glycoprotein particle comprises recombinant adenovirus and/or adeno-associated virus (AAV) proteins. In some embodiments, the glycoprotein particle comprises or consists of a modified AAV viral vector, e.g., an adenovirus dodecahedron or recombinant adenovirus conglomerate.

[0085] AAV-mediated delivery systems are known in the art, and are described, for example, in PCT/US2021/062714, the contents of which are incorporated by reference in their entirety herein.

[0086] Being naturally replication-defective and capable of transducing nearly every cell type in the human body, AAV, and modified AAV, represent suitable vectors for therapeutic use in gene therapy or vaccine delivery. Typically, when producing a recombinant AAV, the sequence between the two inverted terminal repeats (ITRs) is replaced with one or more sequences of interest (e.g., a transgene), and the Rep and Cap sequences are provided in trans, making the ITRs the only viral DNA that remains in the vector. The resulting recombinant AAV vector genome construct comprises two cis-acting 130 to 145-nucleotide ITRs flanking an expression cassette encoding the transgene sequences of interest, providing at least 4.7 kb or more for packaging of foreign DNA that can include a transgene, one or more promoters and accessory elements, such that the total size of the vector is below 5 to 5.2 kb, which is compatible with packaging within the AAV capsid (it being understood that as the size of the construct exceeds this threshold, the packaging efficiency of the vector decreases). The transgene may encode a therapeutic or diagnostic payload, as described herein.

[0087] By “adeno-associated virus inverted terminal repeats” or “AAV ITRs” is meant the art recognized regions found at each end of the AAV genome which function together in cis as origins of DNA replication and as packaging signals for the virus. AAV ITRs, together with the AAV rep coding region, provide for the efficient excision and rescue from, and integration of a nucleotide sequence interposed between two flanking ITRs into a mammalian cell genome.

[0088] The nucleotide sequences of AAV ITR regions are known in the art. See, for example Kotin, R. M. (1994) Human Gene Therapy 5:793-801; Berns, K. I. “Parvoviridae and their Replication” in Fundamental Virology, 2nd Edition, (B. N. Fields and D. M. Knipe, eds.). As used herein, an AAV ITR need not have the wild-type nucleotide sequence depicted, but may be altered, e.g., by the insertion, deletion or substitution of nucleotides. Additionally, the AAV ITR may be derived from any of several AAV serotypes, including without limitation, AAV1, AAV2, AAV3, AAV4, AAV5, AAV6, AAV7, AAV8, AAV9, AAV10, AAV11, AAV12, AAV 44.9, AAV-Rh74, and AAVRh10, and modified capsids of these serotypes. Furthermore, 5′ and 3′ ITRs which flank a selected nucleotide sequence in an AAV vector need not necessarily be identical or derived from the same AAV serotype or isolate, so long as they function as intended, i.e., to allow for excision and rescue of the sequence of interest from a host cell genome or vector, and to allow integration of the heterologous sequence into the recipient cell genome when AAV Rep gene products are present in the cell. Use of AAV serotypes for integration of heterologous sequences into a host cell is known in the art (see, e.g., WO2018195555A1 and US20180258424A1, incorporated by reference herein). In one particular embodiment, the ITRs are derived from serotype AAV1. In another particular embodiment, the ITRs are derived from serotype AAV2, including the 5′ ITR having sequence

(SEQ ID NO: 1176)
CCTGCAGGCAGCTGCGCGCTCGCTCGCTCACTGAGGCCGCCCGGGCGTC
GGGCGACCTTTGGTCGCCCGGCCTCAGTGAGCGAGCGAGCGCGCAGAGA
GGGAGTGGCCAACTCCATCACTAGGGGTTCCT

and the 3′ ITR having sequence

(SEQ ID NO: 1177)
AGGAACCCCTAGTGATGGAGTTGGCCACTCCCTCTCTGCGCGCTCGCTC
GCTCACTGAGGCCGGGCGACCAAAGGTCGCCCGACGCCCGGGCTTTGCC
CGGGCGGCCTCAGTGAGCGAGCGAGCGCGCAGCTGCCTGCAGG.

[0089] By “AAV rep coding region” is meant the region of the AAV genome which encodes the replication proteins Rep 78, Rep 68, Rep 52 and Rep 40. These Rep expression products have been shown to possess many functions, including recognition, binding and nicking of the AAV origin of DNA replication, DNA helicase activity and modulation of transcription from AAV (or other heterologous) promoters. The Rep expression products are collectively required for replicating the AAV genome.

[0090] By “AAV cap coding region” is meant the region of the AAV genome which encodes the capsid proteins VP1, VP2, and VP3, or functional homologues thereof. These Cap expression products supply the packaging functions which are collectively required for packaging the viral genome.

[0091] Glycoprotein particles of the disclosure may be AAV vectors, modified AAV vectors, or comprise any of the AAV proteins or genomes as described herein.

### Lipid Nanoparticles (LNP)

[0092] In some embodiments, a glycoprotein particle of the disclosure comprises a lipid-containing particle, e.g., a liposome, a liposomal nanoparticle (LNP), a cationic lipid containing particle, or an exosome. A glycoprotein particle of the disclosure comprising an LNP may comprise a diversity of lipids to confer stability and/or specificity to the LNP. In some embodiments, a glycoprotein particle comprises an LNP comprising ionizable lipids, wherein the ionizable lipids comprise one or more of N-[1-(2,3-dioleyloxy)propyl]-N,N,N-trimethylammonium chloride (DOTMA), 5-carboxyspermylglycinedioctadecylamide (DOGS), 2,3-dioleyloxy-N-[2(spermine-carboxamido)ethyl]-N,N-dimethyl-1-propanaminium (DOSPA), 1,2-Dioleoyl-3-Dimethylammonium-Propane (DODAP), and/or 1,2-Dioleoyl-3-Trimethylammonium-Propane (DOTAP), or variations thereof. An LNP may also comprise one or more of 1,2-distearyloxy-N,N-dimethyl-3-aminopropane (DSDMA), 1,2-dioleyloxy-N,N-dimethyl-3-aminopropane (DODMA), 1,2-dilinoleyloxy-N,N-dimethyl-3-aminopropane (DLinDMA), 1,2-dilinolenyloxy-N,N-dimethyl-3-aminopropane or (DLenDMA), N-dioleyl-N,N-dimethylammonium chloride (DODAC), or variations thereof. In other embodiments, an LNP may comprise a ionizable lipid of XTC (2,2-Dilinoleyl-4-dimethylaminoethyl-[1,3]-dioxolane), MC3 (((6Z,9Z,28Z,31Z)-heptatriaconta-6,9,28,31-tetraen-19-yl 4-(dimethylamino)butanoate), ALNY-100 ((3aR,5s,6aS)—N,N-dimethyl-2,2-di((9Z,12Z)-octadeca-9,12-dienyl)tetrahydro-3aH-cyclopenta[d] [1,3]dioxol-5-amine)), NC98-5 (4,7,13-tris(3-oxo-3-(undecylamino)propyl)-N1,N16-diundecyl-4,7,10,13-tetraazahexadecane-1,16-diamide), or variants thereof.

[0093] In some embodiments, a glycoprotein particle of the disclosure comprises an LNP comprising additional lipids that stabilize the particle, wherein the stabilizing lipids are selected from one more of: distearoylphosphatidylcholine (DSPC), dioleoylphosphatidylcholine (DOPC), dipalmitoylphosphatidylcholine (DPPC), dioleoylphosphatidylglycerol (DOPG), dipalmitoylphosphatidylglycerol (DPPG), dioleoylphosphatidylethanolamine (DOPE), palmitoyloleoylphosphatidylcholine (POPC), palmitoyloleoyl-phosphatidylethanolamine (POPE), dioleoyl-phosphatidylethanolamine 4-(N-maleimidomethyl)-cyclohexane-1-carboxylate (DOPE-mal), dipalmitoyl phosphatidyl ethanolamine (DPPE), dimyristoylphosphoethanolamine (DMPE), distearoyl-phosphatidyl-ethanolamine (DSPE), 16-O-monomethyl PE, 16-O-dimethyl PE, 18-1-trans PE, 1-stearoyl-2-oleoyl-phosphatidyethanolamine (SOPE), or variants thereof.

[0094] In some embodiments, a glycoprotein particle of the disclosure comprises an LNP comprising one or more phosphatidyl lipids, for example, the phosphatidyl compounds (e.g., phosphatidylglycerol, phosphatidylcholine, phosphatidylserine and phosphatidylethanolamine). In some embodiments, the LNP comprises sphingolipids, for example but not limited to, sphingosine, ceramide, sphingomyelin, cerebroside and ganglioside.

[0095] In some embodiments, a glycoprotein particle of the disclosure comprises an LNP comprising one or more cholesterol-based lipids. A cholesterol-based lipid may include but is not limited to: PEGylated cholesterol, DC-Choi (N,N-dimethyl-N-ethylcarboxamidocholesterol), 1,4-bis(3-N-oleylamino-propyl)piperazine.

[0096] In some embodiments, the addition of PEGylated lipids in a glycoprotein particle comprising an LNP protects an LNP from immune targeting. In some embodiments, lipids modified with other hydrophilic molecules may be substituted for PEGylated lipids.

[0097] Glycoproteins of the disclosure can be attached to LNP using any methods known in the art, described in more detail below.

### Organic Polymer-Based Particles

[0098] In some embodiments, a glycoprotein particle of the disclosure comprises a particle comprising organic polymers, alone or in combination with other particles, as described herein. A glycoprotein particle comprising organic polymers may comprise, for example, one or more of polyacrylates, polyalkylcyanoacrylates, polylactide, polylactide-polyglycolide copolymers, polycaprolactones, dextran, albumin, gelatin, alginate, collagen, chitosan, cyclodextrins, protamine, polyethylene glycol (PEG)-modified (PEGylated) protamine, poly-D-lysine (PLL), PEGylated PLL, polyethylenimine (PEI), or poly (lactic-co-glycolic acid) (PLGA).

### Inorganic Nanoparticles

[0099] In some embodiments, a glycoprotein particle of the disclosure comprises an inorganic nanoparticle, e.g., comprising gold, iron, calcium phosphate and/or silica. Inorganic nanoparticles may exhibit radioactive and/or plasmonic properties, and are thus particularly suitable for diagnostics and imaging. In some embodiments, a glycoprotein particle of the disclosure comprises quantum dots comprising semiconducting materials, e.g., silicon, for use in imaging and diagnostics.

[0100] In some embodiments, a glycoprotein particle comprises a microparticle. A microparticle as used herein refers to a particle of matter with a diameter between about 1 and about 1000 μm in size. Microparticles are include a variety of materials, including ceramics, glass, polymers, and metals. In some embodiments, the particle is a polymeric microparticle comprising a glycoprotein of the disclosure. In some embodiments, the polymeric microparticle comprises a polymer micelle.

[0101] In some embodiments, a glycoprotein particle comprises a nanoparticle. A nanoparticle as used herein refers to a particle of matter with a diameter between about 1 nm to about 100 nm, optionally from about 500 nm to about 1 μm. Non-limiting examples include fullerenes, metals, biological polymers, dendrimers, quantum dots, lipids, nucleic acid vectors, viral-like-particles, or any combination thereof. In some embodiments, the nanoparticle is a lipid particle (including for example, cationic lipids, non-cationic lipids, cholesterol-based lipids, and PEG-modified lipids). In some embodiments, the nanoparticle is a viral-like nanoparticle (including for example viral structural proteins, lipids, and/or carbohydrates). In some embodiments, the particle is a polymeric nanoparticle, e.g., a nanocapsule or a nanosphere. In some embodiments, the polymeric nanoparticle comprises a polymer micelle.

[0102] In some embodiments, a glycoprotein particle comprises one or more of fullerenes, metals, biological polymers, dendrimers, quantum dots, lipids, nucleic acid vectors, and viral structural proteins.

### IV. Payloads

[0103] Glycoprotein particles of the disclosure can be configured for delivery of any type of payload including, but not limited to, proteins, nucleic acids, small molecules and combinations thereof. In some embodiments, glycoprotein particle delivery of a payload is for therapeutic and/or diagnostic use. For example, VLPs, LNPs, and organic polymer-based particles can be used to deliver therapeutic payloads for the treatment of a variety of diseases, while inorganic nanoparticles can be used in diagnostic imaging.

[0104] Glycoprotein particles of the disclosure can be configured to deliver a diversity of protein-based therapeutics, including, but not limited to cytokines (e.g., interferons (IFNs) α, β, and γ, TNF-α, G-CSF, GM-CSF)), interleukins (e.g., IL-1 to IL-40), growth factors (e.g., VEGF, PDGF, IGF-1, EGF, and TGF-β), enzymes, receptors, microproteins, hormones (e.g., growth hormone, insulin), erythropoietin, RNAse, DNAse, blood clotting factors (e.g. FVII, FVIII, FIX, FX), anticoagulants, bone morphogenetic proteins, engineered protein scaffolds, thrombolytics (e.g., streptokinase, tissue plasminogen activator, plasminogen, and plasmid), antibodies, antibody fragments, antibody fusion proteins, CRISPR proteins (Class 1 and Class 2 Type II, Type V, or Type VI), transcription factors, transposons, reverse transcriptases, viral interferon antagonists, tick proteins, as well as engineered proteins such as anti-cancer modalities or biologics intended to treat diseases such as neurologic, metabolic, cardiovascular, liver, renal, or endocrine diseases and disorders, or any combination of the foregoing. In some embodiments, the glycoprotein particle comprising a CRISPR protein payload comprises a Class 2, Type V CRISPR/Cas protein amino acid sequence of one or more of CasX, Cas12a (Cpf1), Cas12b (C2c1), Cas12c (C2c3), Cas12d (CasY), Cas12e (CasX), Cas12f, Cas12g, Cas12h, Cas12i, Cas12j, Cas12k, Cas14, and/or CasΦ.

[0105] Glycoprotein particles of the disclosure can be configured to deliver nucleic acid payloads, including sequences encoding the foregoing protein therapeutic payloads, as well as single-stranded antisense oligonucleotides (ASOs), double-stranded RNA interference (RNAi) molecules, DNA aptamers, RNA aptamers, nucleic acids utilized in gene therapy (e.g., guide RNAs (gRNAs) utilized in CRISPR systems, and donor templates), microRNAs, ribozymes, RNA decoys, circular RNAs, or any combination of the foregoing.

[0106] In some embodiments, the glycoprotein particle comprising a CRISPR protein payload comprises a Class 2, Type II CRISPR/Cas protein. In some embodiments, the Class 2, Type II CRISPR/Cas protein comprises Cas9. In some embodiments, the Cas9 is isolated or derived from S. pyogenes, Staphylococcus aureus, Streptococcus thermophilus, Neisseria meningitidis or Treponema denticola. In some embodiments, the glycoprotein particle further comprises a Cas9 guide RNA (gRNA). A Cas9 gRNA refers to a guide RNA which is capable of binding to the Cas9 protein and targeting the Cas9 protein to a target nucleic acid. Sequences of gRNAs configured to hybridize to their cognate CRISPR/Cas protein, describe supra, will be apparent to persons of ordinary skill in the art.

[0107] In some embodiments, the glycoprotein particle comprises a nucleic acid encoding a Class 2, Type II CRISPR/Cas protein, e.g., Cas9. Class 2 systems are distinguished from Class 1 systems in that they have a single, large, multi-domain effector protein. In certain embodiments, the Class 2 system utilized in the payload of the glycoprotein particle is a Type II, Type V, or Type VI system. Each type of Class 2 system is further divided into subtypes. Class 2, Type II systems can be divided into 4 subtypes: II-A, II-B, II-C1, and II-C2. Class 2, Type V systems can be divided into 17 subtypes: V-A, V-B1, V-B2, V-C, V-D, V-E, V-F1, V-F1(V-U3), V-F2, V-F3, V-G, V-H, V-I, V-K (V-U5), V-U1, V-U2, and V-U4. Class 2, Type VI systems can be divided into 5 subtypes: VI-A, VI-B1, VI-B2, VI-C, and VI-D.

[0108] Nucleases of Type V systems differ from Type II effectors (e.g., Cas9), which contain two nuclear domains that are each responsible for the cleavage of one strand of the target DNA, with the HNH nuclease inserted inside the Ruv-C like nuclease domain sequence. The Type V nucleases possess a single RNA-guided RuvC domain-containing effector but no HNH domain, and they recognize T-rich PAM 5′ upstream to the target region on the non-targeted strand, which is different from Cas9 systems which rely on G-rich PAM at 3′ side of target sequences. Type V nucleases generate staggered double-stranded breaks distal to the PAM sequence, unlike Cas9, which generates a blunt end in the proximal site close to the PAM. In addition, Type V nucleases degrade ssDNA in trans when activated by target dsDNA or ssDNA binding in cis. In some embodiments, the Type V nucleases utilized in the embodiments recognize a 5′ TC PAM motif and produce staggered ends cleaved by the RuvC domain. The Type V systems (e.g., Cas12) only contain a RuvC-like nuclease domain that cleaves both strands. Type VI (Cas13) are unrelated to the effectors of Type II and V systems and contain two HEPN domains and target RNA. In some embodiments, the glycoprotein particle comprises a payload comprising a Class 2 Type II CRISPR system, e.g., a Type II-A CRISPR system. In some embodiments, the payload comprises a Type II-B CRISPR system. In some embodiments, the payload comprises a Type II-C1 CRISPR system. In some embodiments, the payload comprises a Type II-C2 CRISPR system.

[0109] In some embodiments, the glycoprotein particle comprises a payload comprising a Class 2 Type V system. In some embodiments, the payload comprises a Type V-A CRISPR system. In some embodiments, the payload comprises a Type V-B 1 CRISPR system. In some embodiments, the payload comprises a Type V-B2 CRISPR system. In some embodiments, the payload comprises a Type V-C CRISPR system. In some embodiments, the payload comprises a Type V-D CRISPR system. In some embodiments, the payload comprises a Type V-E CRISPR system. In some embodiments, the payload comprises a Type V-F1 CRISPR system. In some embodiments, the Type V CRISPR system is a V-F1 (V-U3) CRISPR system. In some embodiments, the payload comprises a Type V-F2 CRISPR system. In some embodiments, the payload comprises a Type V-F3 CRISPR system. In some embodiments, the payload comprises a Type a V-G CRISPR system. In some embodiments, the Type V CRISPR system is a V-H CRISPR system. In some embodiments, the Type V CRISPR system is a V-I CRISPR system. In some embodiments, the Type V CRISPR system is a V-K (V-U5) CRISPR system. In some embodiments, the Type V CRISPR system is a V-U1 CRISPR system. In some embodiments, the Type V CRISPR system is a V-U2 CRISPR system. In some embodiments, the Type V CRISPR system is a V-U4 CRISPR system. In some embodiments, the Type V CRISPR system is selected from the group consisting of Cas12a (Cpf1), Cas12b (C2c1), Cas12c (C2c3), Cas12d (CasY), Cas12e (CasX), Cas12f, Cas12g, Cas12h, Cas12i, Cas12j, Cas12k, Cas12l, Cas14, and CasΦ.

[0110] In some embodiments the glycoprotein particle comprises a payload comprising a Class 2 Type VI system. In some embodiments, the Type VI CRISPR system is a VI-A CRISPR system. In some embodiments, the Type VI CRISPR system is a VI-B 1 CRISPR system. In some embodiments, the Type VI CRISPR system is a VI-B2 CRISPR system. In some embodiments, the Type VI CRISPR system is a VI-C CRISPR system. In some embodiments, the Type VI CRISPR system is a VI-D CRISPR system. In some embodiments, the glycoprotein particle comprises a payload comprising a Type VI CRISPR system selected from Cas13a (C2c2), Cas13b (Group 29/30), Cas13c, and/or Cas13d.

[0111] In some embodiments, a glycoprotein particle is configured to deliver a gene editing pair comprising a CasX variant of Table 2 and a nucleic acid comprising one or more guide RNA scaffolds of Table 3. In some embodiments, a glycoprotein particle is configured to deliver a gene editing pair comprising a CasX variant protein of Table 2 and a gRNA comprising a gRNA scaffold of Table 3, wherein the gRNA comprises a targeting sequence, and wherein the targeting sequence of the gRNA has a sequence complementary to and is able to hybridize with a target nucleic acid sequence. Upon hybridization by the CasX and the gRNA gene editing pair with the target nucleic acid sequence, the CasX protein introduces one or more single-strand breaks or double-strand breaks within or near the target nucleic acid. The target nucleic acid can include sequences that contain regulatory elements, coding regions, or non-coding regions of a gene, and repair of the double or single-stranded break can result in a permanent indel (deletion or insertion) or mutation in a target nucleic acid due to the cell's repair mechanisms such as non-homologous end joining (NHEJ). If the particle also includes a donor template, repair of the break can result in the introduction of a sequence at or near the site of the break via templated repair mechanisms or site-specific insertion methods such as e.g., homology-directed repair (HDR), or homology-independent targeted integration (HITI). Additional cellular repair mechanisms that can be used to introduce changes in target nucleic acids using gene editing systems delivered using the glycoprotein particles described herein include, but are not limited to micro-homology mediated end joining (MMEJ), single strand annealing (SSA) or base excision repair (BER). The permanent change in nucleic acid sequence by the gene editing pair, as delivered by the glycoprotein particle, can result in a corresponding modulation of expression or alteration in the function of a gene product.

TABLE 2
CasX Protein Sequences

| SEQ ID NO | Variant |
|---|---|
| 574 | 119 |
| 575 | 429 |
| 576 | 430 |
| 577 | 431 |
| 578 | 432 |
| 579 | 433 |
| 580 | 434 |
| 581 | 435 |
| 582 | 436 |
| 583 | 437 |
| 584 | 438 |
| 585 | 439 |
| 586 | 440 |
| 587 | 441 |
| 588 | 442 |
| 589 | 443 |
| 590 | 444 |
| 591 | 445 |
| 592 | 446 |
| 593 | 447 |
| 594 | 448 |
| 595 | 449 |
| 596 | 450 |
| 597 | 451 |
| 598 | 452 |
| 599 | 453 |
| 600 | 454 |
| 601 | 455 |
| 602 | 456 |
| 603 | 457 |
| 604 | 458 |
| 605 | 459 |
| 606 | 460 |
| 607 | 278 |
| 608 | 279 |
| 609 | 280 |
| 610 | 285 |
| 611 | 286 |
| 612 | 287 |
| 613 | 288 |
| 614 | 290 |
| 615 | 291 |
| 616 | 293 |
| 617 | 300 |
| 618 | 492 |
| 619 | 493 |
| 620 | 387 |
| 621 | 395 |
| 622 | 485 |
| 623 | 486 |
| 624 | 487 |
| 625 | 488 |
| 626 | 489 |
| 627 | 490 |
| 628 | 491 |
| 629 | 494 |
| 630 | 328 |
| 631 | 388 |
| 632 | 389 |
| 633 | 390 |
| 634 | 514 |
| 635 | 515 |
| 636 | 516 |
| 637 | 517 |
| 638 | 518 |
| 639 | 519 |
| 640 | 520 |
| 641 | 522 |
| 642 | 523 |
| 643 | 524 |
| 644 | 525 |
| 645 | 526 |
| 646 | 527 |
| 647 | 528 |
| 648 | 529 |
| 649 | 530 |
| 650 | 531 |
| 651 | 532 |
| 652 | 533 |
| 653 | 534 |
| 654 | 535 |
| 655 | 536 |
| 656 | 537 |
| 657 | 538 |
| 658 | 539 |
| 659 | 540 |
| 660 | 541 |
| 661 | 542 |
| 662 | 543 |
| 663 | 544 |
| 664 | 545 |
| 665 | 546 |
| 666 | 547 |
| 667 | 548 |
| 668 | 550 |
| 669 | 551 |
| 670 | 552 |
| 671 | 553 |
| 672 | 554 |
| 673 | 555 |
| 674 | 556 |
| 675 | 557 |
| 676 | 558 |
| 677 | 559 |
| 678 | 560 |
| 679 | 561 |
| 680 | 562 |
| 681 | 563 |
| 682 | 564 |
| 683 | 565 |
| 684 | 566 |
| 685 | 567 |
| 686 | 568 |
| 687 | 569 |
| 688 | 570 |
| 689 | 571 |
| 690 | 572 |
| 691 | 573 |
| 692 | 574 |
| 693 | 575 |
| 694 | 576 |
| 695 | 577 |
| 696 | 578 |
| 697 | 579 |
| 698 | 580 |
| 699 | 581 |
| 700 | 582 |
| 701 | 583 |
| 702 | 584 |
| 703 | 585 |
| 704 | 586 |
| 705 | 587 |
| 706 | 588 |
| 707 | 589 |
| 708 | 590 |
| 709 | 591 |
| 710 | 592 |
| 711 | 593 |
| 712 | 594 |
| 713 | 595 |
| 714 | 596 |
| 715 | 597 |
| 716 | 598 |
| 717 | 599 |
| 718 | 600 |
| 719 | 601 |
| 720 | 602 |
| 721 | 603 |
| 722 | 604 |
| 723 | 605 |
| 724 | 606 |
| 725 | 607 |
| 726 | 608 |
| 727 | 609 |
| 728 | 610 |
| 729 | 611 |
| 730 | 612 |
| 731 | 613 |
| 732 | 614 |
| 733 | 615 |
| 734 | 616 |
| 735 | 617 |
| 736 | 618 |
| 737 | 619 |
| 738 | 620 |
| 739 | 621 |
| 740 | 622 |
| 741 | 623 |
| 742 | 624 |
| 743 | 625 |
| 744 | 626 |
| 745 | 627 |
| 746 | 628 |
| 747 | 629 |
| 748 | 630 |
| 749 | 631 |
| 750 | 632 |
| 751 | 633 |
| 752 | 634 |
| 753 | 635 |
| 754 | 636 |
| 755 | 637 |
| 756 | 638 |
| 757 | 639 |
| 758 | 640 |
| 759 | 641 |
| 760 | 642 |
| 761 | 643 |
| 762 | 644 |
| 763 | 645 |
| 764 | 646 |
| 765 | 647 |
| 766 | 648 |
| 767 | 649 |
| 768 | 650 |
| 769 | 651 |
| 770 | 652 |
| 771 | 653 |
| 772 | 654 |
| 773 | 655 |
| 774 | 656 |
| 775 | 657 |
| 776 | 658 |
| 777 | 659 |
| 778 | 660 |
| 779 | 661 |
| 780 | 662 |
| 781 | 663 |
| 782 | 664 |
| 783 | 665 |
| 784 | 666 |
| 785 | 667 |
| 786 | 668 |
| 787 | 669 |
| 788 | 671 |
| 789 | 672 |
| 790 | 673 |
| 791 | 674 |
| 792 | 675 |
| 793 | 676 |
| 794 | 677 |
| 795 | 678 |
| 796 | 679 |
| 797 | 680 |
| 798 | 681 |
| 799 | 682 |
| 800 | 683 |
| 801 | 684 |
| 802 | 685 |
| 803 | 686 |
| 804 | 687 |
| 805 | 688 |
| 806 | 689 |
| 807 | 690 |
| 808 | 691 |
| 809 | 692 |
| 810 | 693 |
| 811 | 694 |
| 812 | 701 |
| 813 | 702 |
| 814 | 703 |
| 815 | 704 |
| 816 | 705 |
| 817 | 706 |
| 818 | 707 |
| 819 | 708 |
| 820 | 709 |
| 821 | 710 |
| 822 | 711 |
| 823 | 712 |
| 824 | 713 |
| 825 | 714 |
| 826 | 715 |
| 827 | 716 |
| 828 | 717 |
| 829 | 718 |
| 830 | 719 |
| 831 | 720 |
| 832 | 721 |
| 833 | 722 |
| 834 | 723 |
| 835 | 724 |
| 836 | 725 |
| 837 | 726 |
| 838 | 727 |
| 839 | 728 |
| 840 | 729 |
| 841 | 730 |
| 842 | 731 |
| 843 | 732 |
| 844 | 733 |
| 845 | 734 |
| 846 | 735 |
| 847 | 736 |
| 848 | 737 |
| 849 | 738 |
| 850 | 739 |
| 851 | 740 |
| 852 | 741 |
| 853 | 742 |
| 854 | 743 |
| 855 | 744 |
| 856 | 745 |
| 857 | 746 |
| 858 | 747 |
| 859 | 748 |
| 860 | 749 |
| 861 | 750 |
| 862 | 751 |
| 863 | 752 |
| 864 | 753 |
| 865 | 754 |
| 866 | 755 |
| 867 | 756 |
| 868 | 757 |
| 869 | 758 |
| 870 | 759 |
| 871 | 760 |
| 872 | 761 |
| 873 | 762 |
| 874 | 763 |
| 875 | 764 |
| 876 | 765 |
| 877 | 766 |
| 878 | 767 |
| 879 | 768 |
| 880 | 769 |
| 881 | 770 |
| 882 | 777 |
| 883 | 778 |
| 884 | 779 |
| 885 | 780 |
| 886 | 781 |
| 887 | 782 |
| 888 | 783 |
| 889 | 784 |
| 890 | 785 |
| 891 | 786 |
| 892 | 787 |
| 893 | 788 |
| 894 | 789 |
| 895 | 790 |
| 896 | 791 |
| 897 | 793 |
| 898 | 794 |
| 899 | 795 |
| 900 | 796 |
| 901 | 797 |
| 902 | 798 |
| 903 | 799 |
| 904 | 800 |
| 905 | 801 |
| 906 | 802 |
| 907 | 803 |
| 908 | 804 |
| 909 | 805 |
| 910 | 806 |
| 911 | 807 |
| 912 | 808 |
| 913 | 809 |
| 914 | 810 |
| 915 | 811 |
| 916 | 812 |
| 917 | 813 |
| 918 | 814 |
| 919 | 815 |
| 920 | 816 |
| 921 | 817 |
| 922 | 818 |
| 923 | 819 |
| 924 | 820 |
| 925 | 821 |
| 926 | 822 |
| 927 | 823 |
| 928 | 824 |
| 929 | 825 |
| 930 | 826 |
| 931 | 827 |
| 932 | 828 |
| 933 | 829 |
| 934 | 830 |
| 935 | 831 |
| 936 | 832 |
| 937 | 833 |
| 938 | 834 |
| 939 | 835 |
| 940 | 836 |
| 941 | 837 |
| 942 | 838 |
| 943 | 839 |
| 944 | 840 |

[0112] In some embodiments, a glycoprotein particle of the disclosure comprises a payload comprising a CasX protein of SEQ ID NOS: 574-944 as set forth in Table 2, or a sequence with at least 70%, at least 80%, at least 90%, at least 95% identity thereto. In some embodiments, a glycoprotein particle of the disclosure comprises a payload comprising a CasX protein of SEQ ID NOS: 574-944 as set forth in Table 2. In some embodiments, a glycoprotein particle of the disclosure comprises a payload comprising a nucleic acid encoding a CasX protein of SEQ ID NOS: 574-944 as set forth in Table 2, or a sequence with at least 70%, at least 80%, at least 90%, at least 95% identity thereto. In some embodiments, a glycoprotein particle of the disclosure comprises a payload comprising a nucleic acid encoding a CasX protein of SEQ ID NOS: 574-944 as set forth in Table 2.

TABLE 3
Variant guide RNA sequences

| SEQ ID NO: | Variant |
|---|---|
| 945 | 174 |
| 946 | 175 |
| 947 | 176 |
| 948 | 177 |
| 949 | 179 |
| 950 | 181 |
| 951 | 182 |
| 952 | 183 |
| 953 | 184 |
| 954 | 185 |
| 955 | 186 |
| 956 | 187 |
| 957 | 188 |
| 958 | 189 |
| 959 | 190 |
| 960 | 191 |
| 961 | 192 |
| 962 | 193 |
| 963 | 195 |
| 964 | 196 |
| 965 | 197 |
| 966 | 198 |
| 967 | 199 |
| 968 | 200 |
| 969 | 201 |
| 970 | 202 |
| 971 | 203 |
| 972 | 204 |
| 973 | 205 |
| 974 | 206 |
| 975 | 207 |
| 976 | 208 |
| 977 | 209 |
| 978 | 210 |
| 979 | 211 |
| 980 | 212 |
| 981 | 213 |
| 982 | 214 |
| 983 | 215 |
| 984 | 216 |
| 985 | 217 |
| 986 | 218 |
| 987 | 219 |
| 988 | 220 |
| 989 | 221 |
| 990 | 222 |
| 991 | 223 |
| 992 | 224 |
| 993 | 225 |
| 994 | 226 |
| 995 | 227 |
| 996 | 228 |
| 997 | 229 |
| 998 | 230 |
| 999 | 231 |
| 1000 | 232 |
| 1001 | 233 |
| 1002 | 234 |
| 1003 | 235 |
| 1004 | 236 |
| 1005 | 237 |
| 1006 | 238 |
| 1007 | 239 |
| 1008 | 240 |
| 1009 | 241 |
| 1010 | 242 |
| 1011 | 243 |
| 1012 | 244 |
| 1013 | 245 |
| 1014 | 246 |
| 1015 | 247 |
| 1016 | 248 |
| 1017 | 249 |
| 1018 | 250 |
| 1019 | 251 |
| 1020 | 252 |
| 1021 | 253 |
| 1022 | 254 |
| 1023 | 255 |
| 1024 | 256 |
| 1025 | 257 |
| 1026 | 258 |
| 1027 | 259 |
| 1028 | 260 |
| 1029 | 261 |
| 1030 | 262 |
| 1031 | 263 |
| 1032 | 264 |
| 1033 | 265 |
| 1034 | 266 |
| 1035 | 267 |
| 1036 | 268 |
| 1037 | 269 |
| 1038 | 270 |
| 1039 | 271 |
| 1040 | 272 |
| 1041 | 273 |
| 1042 | 274 |
| 1043 | 275 |
| 1044 | 276 |
| 1045 | 277 |
| 1046 | 278 |
| 1047 | 279 |
| 1048 | 280 |
| 1049 | 281 |
| 1050 | 282 |
| 1051 | 283 |
| 1052 | 284 |
| 1053 | 285 |
| 1054 | 286 |
| 1055 | 287 |
| 1056 | 288 |
| 1057 | 289 |
| 1058 | 290 |
| 1059 | 291 |
| 1060 | 292 |
| 1061 | 293 |
| 1062 | 294 |
| 1063 | 295 |
| 1064 | 296 |
| 1065 | 297 |
| 1066 | 298 |
| 1067 | 299 |
| 1068 | 300 |
| 1069 | 301 |
| 1070 | 302 |
| 1071 | 303 |
| 1072 | 304 |
| 1073 | 305 |
| 1074 | 306 |
| 1075 | 307 |
| 1076 | 308 |
| 1077 | 309 |
| 1078 | 310 |
| 1079 | 311 |
| 1080 | 312 |
| 1081 | 313 |
| 1082 | 314 |
| 1083 | 315 |
| 1084 | 317 |
| 1085 | 318 |
| 1086 | 319 |
| 1087 | 320 |
| 1088 | 321 |
| 1089 | 322 |
| 1090 | 323 |
| 1091 | 324 |
| 1092 | 325 |
| 1093 | 326 |
| 1094 | 327 |
| 1095 | 328 |
| 1096 | 329 |
| 1097 | 330 |
| 1098 | 331 |
| 1099 | 332 |
| 1100 | 333 |
| 1101 | 334 |
| 1102 | 335 |
| 1103 | 336 |
| 1104 | 337 |
| 1105 | 338 |
| 1106 | 339 |
| 1107 | 340 |
| 1108 | 341 |
| 1109 | 343 |
| 1110 | 344 |
| 1111 | 345 |
| 1112 | 346 |
| 1113 | 347 |
| 1114 | 348 |
| 1115 | 349 |
| 1116 | 350 |
| 1117 | 351 |
| 1118 | 352 |
| 1119 | 353 |
| 1120 | 354 |
| 1121 | 355 |
| 1122 | 356 |
| 1123 | 357 |
| 1124 | 358 |
| 1125 | 359 |
| 1126 | 360 |
| 1127 | 361 |
| 1128 | 362 |
| 1129 | 363 |
| 1130 | 364 |
| 1131 | 365 |
| 1132 | 366 |
| 1133 | 367 |
| 1134 | 368 |
| 1135 | 369 |
| 1136 | 370 |
| 1137 | 371 |
| 1138 | 372 |
| 1139 | 373 |
| 1140 | 374 |
| 1141 | 375 |

[0113] In some embodiments, a glycoprotein particle of the disclosure comprises a payload comprising a guide RNA comprising a scaffold of SEQ ID NOS: 945-1141 as set forth in Table 3, or a sequence with at least 70%, at least 80%, at least 90%, at least 95% identity thereto. In some embodiments, a glycoprotein particle of the disclosure comprises a payload comprising a guide RNA comprising a scaffold of SEQ ID NOS: 945-1141 as set forth in Table 3.

[0114] In some embodiments, a glycoprotein particle of the disclosure comprises a payload comprising a CasX protein of SEQ ID NOS: 574-944 as set forth in Table 2, or a sequence with at least 70%, at least 80%, at least 90%, at least 95% identity thereto, and a guide RNA variant of SEQ ID NOS: 945-1141 as set forth in Table 3, or a sequence with at least 70%, at least 80%, at least 90%, at least 95% identity thereto. In some embodiments, a glycoprotein particle of the disclosure comprises a payload comprising a CasX protein of SEQ ID NOS: 574-944 as set forth in Table 2, and a guide RNA comprising a scaffold of SEQ ID NOS: 945-1141 as set forth in Table 3. In some embodiments, the CasX and the gRNA are associated as a ribonucleoprotein. In some embodiments, the gRNA comprises a targeting sequence having 15 to 30 nucleotides that is complementary to, and therefore hybridizes with, a target nucleic acid in a cell, and is linked to the 3′ end of the gRNA scaffold sequence.

[0115] Glycoprotein particles comprising additional gene editing systems, or nucleic acids encoding additional gene editing systems, are also envisaged as within the scope of the instant disclosure. In some embodiments, the gene editing system comprises a zinc finger nuclease (ZFN). Custom-designed ZFNs that combine the non-specific cleavage domain, for example a FokI endonuclease domain, with zinc finger domains that bind to specific target sequences can create site-specific double-strand breaks in a target nucleic acid. In some embodiments, the gene editing system comprises a transcription activator like effector nuclease (TALEN). Transcription Activator-Like Effector Nucleases (TALENs) are artificial restriction enzymes generated by fusing the TAL effector DNA binding domain to a DNA cleavage domain such as FokI. These reagents enable efficient, programmable, and specific DNA cleavage and represent powerful tools for genome editing in situ. Transcription activator-like effectors (TALEs) can be quickly engineered to bind practically any DNA sequence.

[0116] In some embodiments, a glycoprotein particle of the disclosure comprises a small molecule for a therapeutic or diagnostic application. In some embodiments, the glycoprotein particle encapsulates the small molecule. In some embodiments, the glycoprotein particle is covalently or non-covalently attached to the small molecule. In some embodiments, the small molecule is under 1 KD in weight. In some embodiments, the glycoprotein particle confers enhanced tissue specific tropism to the small molecule, and/or lowers the dosage required of the small molecule to treat or diagnose a subject in need thereof.

### V. Methods of Use

[0117] Glycoprotein particles of the disclosure may be used for any application in which cell or tissue targeting is desired. In some embodiments, glycoprotein particles of the disclosure are used in therapeutic applications. In other embodiments, glycoprotein particles of the disclosure are used in diagnostic applications, such as imaging.

[0118] In some embodiments, a glycoprotein particle of the disclosure comprises a therapeutic payload and is administered to treat a disease or disorder in a subject in need thereof. In some embodiments, the disease or disorder is selected from the group consisting of cancers, immunoregulatory diseases, pulmonary diseases and disorders, cardiovascular diseases, infectious diseases, genetic disorders, neurological disorders, endocrine disorders, metabolic disorders, intestinal diseases or disorders, mental illnesses, sexually transmitted diseases, gynecological diseases, urogenital diseases, skin diseases, and ocular diseases.

[0119] In some embodiments, the disease is cancer. In some embodiments, the cancer comprises a solid tumor or a liquid tumor. Exemplary cancers comprising solid tumors, include, but are not limited to, breast cancer, lung cancer, prostate cancer and skin cancer. Exemplary cancers comprising liquid tumors include lymphomas and leukemias.

[0120] In some embodiments, a glycoprotein particle of the disclosure comprises any of the therapeutic payloads described herein, e.g., a gene editing pair comprising a CasX protein of Table 2 and a gRNA comprising a scaffold of Table 3, for use in treating a disease in a subject in need thereof, wherein the glycoprotein particle delivers the therapeutic payload to the diseased cell or tissue.

[0121] In some embodiments, delivery of a therapeutic payload treats the disease or disorder in the subject. In some embodiments, delivery of a therapeutic payload reduces a sign or a symptom of the disease or disorder in the subject. In some embodiments, the therapeutic payload is administered as part of an ongoing treatment.

[0122] In some embodiments, a glycoprotein particle of the disclosure comprises a diagnostic payload to diagnose a subject at risk for developing a disease or disorder, or suspected of having a disease or disorder. In some embodiments, a glycoprotein particle comprises an imaging moiety, e.g., a fluorophore or inorganic metal for use in diagnostic imaging, wherein the glycoprotein protein targets and delivers the imaging moiety to the cell or tissue of interest. Exemplary fluorophores include both proteins such as green fluorescent protein (GFP), red fluorescent protein (RFP) and their derivatives, as well as inorganic fluorophores, such as dyes. Exemplary fluorescent dyes include but are not limited to, 7-Amino-actinomycin D, Acridine orange, Acridine yellow, Alexa Fluor dyes (Molecular Probes), Auramine O, Auramine-rhodamine stain, Benzanthrone, 9,10-Bis(phenylethynyl)anthracene, 5,12-Bis(phenylethynyl)naphthacene, CFDA-SE, CFSE, Calcein, Carboxyfluorescein, 1-Chloro-9,10-bis(phenylethynyl)anthracene, 2-Chloro-9,10-bis(phenylethynyl)anthracene, Coumarin, Cyanine, DAPI, Dark quencher, Dioc6, DyLight Fluor dyes (Thermo Fisher Scientific), Ethidium bromide, Fluorescein, Fura-2, Fura-2-acetoxymethyl ester, Green fluorescent protein and derivatives, Hilyte Fluor dyes (AnaSpec), Hoechst stain, Indian yellow, Luciferin, Perylene, Phycobilin, Phycoerythrin, Phycoerythrobilin, Propidium iodide, Pyranine, Rhodamine, RiboGreen, Rubrene, Ruthenium(II) tris(bathophenanthroline disulfonate), SYBR Green, Stilbene, Sulforhodamine 101, TSQ, Texas Red, and Umbelliferone.

[0123] In some embodiments, inclusion of a glycoprotein in a glycoprotein particle increases the delivery of the glycoprotein particle to a target cell or tissue, relative to an equivalent particle without the glycoprotein. In some embodiments, inclusion of the glycoprotein in the glycoprotein particle increases the cell or tissue targeting by at least a 2-fold, at least a 3-fold, at least a 4-fold, at least a 5-fold, at least a 10-fold, at least a 15-fold, or at least a 20-fold increase, compared to an equivalent particle without the glycoprotein, when assayed under comparable conditions.

[0124] In some embodiments, inclusion of a glycoprotein in a glycoprotein particle comprising a gene editing system increases editing in a target cell or tissue relative to an equivalent particle without the glycoprotein. In some embodiments, inclusion of the glycoprotein increases gene editing by at least 2-fold, at least a 3-fold, at least a 4-fold, at least a 5-fold, at least a 10-fold, at least a 15-fold, or at least a 20-fold relative to a particle without the glycoprotein, when assayed under comparable conditions.

[0125] Representative examples demonstrating enhanced binding and uptake of glycoprotein particles of the disclosure to target cells and demonstrating payload delivery, e.g., enhanced gene editing of target nucleic acids, are provided in the Examples.

[0126] In some embodiments, a glycoprotein particle as provided herein is formulated as a pharmaceutical composition comprising a pharmaceutically acceptable carrier, diluent or excipient.

### VI. Methods of Making

[0127] Also provided herein are methods of making the glycoprotein particles described herein. Glycoprotein particles of the disclosure may comprise viral-like particles, lipid nanoparticles, liposomes, exosomes, organic polymer-based particles, inorganic nanoparticles, or any combination thereof, and are designed to deliver one or more payloads to a target cell or tissue. Glycoproteins can be incorporated into the particles described herein using any methods known in the art, including, but not limited to, incorporation into the membrane by a host cell producing the particle, covalent attachment to one or more components of the particle, and non-covalent attachment to one or more components of the particle.

[0128] A glycoprotein particle comprising a viral-like particle (VLP) of the disclosure comprises one or more viral structural proteins that may be assembled in vivo through recombinant expression of viral proteins or in vitro using previously purified viral proteins. In preferred embodiments, a glycoprotein particle comprising a VLP comprises lentiviral structural proteins and is assembled in vivo. In some preferred embodiments, a glycoprotein particle comprising a VLP comprises a lipid membrane derived from the host cell. In some embodiments, a glycoprotein particle is produced from nucleic acid sequences encoding a glycoprotein, or a fragment thereof, and VLP structural proteins, which are encoded on one or more plasmids that are co-transfected into a host cell, e.g., as shown in FIGS. 3, 10, and 11. In some embodiments the nucleic acid sequences encoding the glycoprotein are codon optimized.

[0129] In some embodiments, a glycoprotein-containing VLP is assembled when a glycoprotein, or fragment thereof, is trafficked to and integrates into a nascent viral membrane prior to VLP budding from the host cell. In some embodiments, a glycoprotein particle comprises a therapeutic or diagnostic payload, wherein the payload is co-expressed in the host cell, and wherein the therapeutic payload is encapsulated in the VLP during or prior to budding from the host cell. In some embodiments, an encapsulated payload of a glycoprotein VLP comprises a genetic editing system comprising a CasX protein and a guide RNA.

[0130] In some embodiments, a glycoprotein particle comprises an exosome, derived from a host cell expressing the glycoprotein, or fragment thereof. Exosomes comprising the glycoproteins described herein can be produced by any suitable cell type expressing the glycoprotein, including, but not limited to, mammalian cells such as CHO, HeLa or Jurkat cells. In some embodiments, the glycoprotein particle comprising an exosome comprises a therapeutic payload expressed in the host cell. Exosomes may be isolated by methods known in the art, to isolate exosomes based on their density and size differences from other components in a sample, i.e., size-exclusion chromatography, precipitation, affinity capture or various centrifugation techniques.

[0131] In some embodiments, a glycoprotein particle comprises a liposome or lipid nanoparticle (LNP), wherein the lipid particle is assembled in vitro. A glycoprotein particle comprising a lipid particle may be assembled, for example, in a microfluidics system wherein the membrane bound glycoprotein, or fragment thereof, is mixed in the lipid phase with the other lipid components. In some embodiments, a glycoprotein particle comprising a lipid particle comprises a payload. In some embodiments, the payload is incorporated into the liposome or LNP in an aqueous phase, wherein the payload and the lipid components, i.e., a glycoprotein and LNP components, are mixed using a controlled flow rate.

[0132] In some embodiments, a glycoprotein particle comprises an organic polymer-based particle, e.g., a particle comprising one or more of polyacrylates, polyalkylcyanoacrylates, polylactide, polylactide-polyglycolide copolymers, polycaprolactones, dextran, albumin, gelatin, alginate, collagen, chitosan, cyclodextrins, protamine, polyethylene glycol (PEG)-modified (PEGylated) protamine, poly-D-lysine (PLL), PEGylated PLL, polyethylenimine (PEI), or poly (lactic-co-glycolic acid) (PLGA).

[0133] Organic polymers may be made according to methods known in the art, and are commercially available from chemical suppliers such as Sigma Aldrich. In some embodiments, a glycoprotein particle comprises a particle comprising poly (lactic-co-glycolic acid) (PLGA). PLGA particles may be made, for example, using the emulsification-solvent evaporation and nanoprecipitation techniques as described in Hernández-Giottonini et al. Royal Society of Chemistry Advances. 2020. v10:4218-4231.

[0134] In some embodiments, a glycoprotein particle comprises an inorganic particle, e.g., comprising gold, iron, calcium phosphate and/or silica that is conjugated to a glycoprotein by methods known in the art. In some embodiments, a glycoprotein may comprise for example, a gold nanoparticle which allows for cysteine-gold covalent bonding, and/or electrostatic attachment of the nanoparticle to charged groups of the protein.

[0135] In some embodiments, the glycoprotein, or fragment thereof, is conjugated to the surface of a particle, e.g., to a viral-like particle (VLP), a liposome, an exosome, a lipid nanoparticle (LNP), an organic polymer-based particle, and/or an inorganic particle. In some embodiments, the glycoprotein is a biotinylated glycoprotein, and one or more components of the particle (other than the glycoprotein) comprise an avidin or streptavidin component. The biotinylated glycoprotein then binds to the avidin or streptavidin component of the particle, thereby producing a glycoprotein particle wherein the glycoprotein is conjugated to the particle via the biotin/avidin or biotin/streptavidin interaction.

[0136] In some embodiments, a glycoprotein particle comprises one or more components of the particle (other than the glycoprotein) that have been modified to have a chemically reactive functional groups for conjugation of the glycoprotein to the particle. For example, PLGA polymers for use in making a glycoprotein particle can be modified to comprise a COOH group to bind amino acids through the conventional carbodiimide coupling reaction. Alternatively, or in addition, the PLGA polymers can be modified to include a maleimide group to bind thiol-containing amino acids. In some embodiments, an inorganic particle, e.g., a gold nanoparticle, is functionalized with PEG thiols to facilitate attachment of a properly folded glycoprotein, as described in Aubin-Tam, Methods of Molecular Biology 2013:1025:19-27.

[0137] In some embodiments, the glycoprotein, or fragment thereof comprises a modified or non-natural amino acid functionalized for conjugation of the glycoprotein with the particle. For example, the glycoprotein, or fragment thereof, can incorporate an amino acid functionalized to bind a particle using an alkyne/azide click reaction, carbonyl condensation, Michael-type addition, or Mizoroki-Heck substitution, all of which are known to persons of skill in the art.

[0138] The payload can be incorporated or attached to the glycoprotein particle using any methods known in the art. In some embodiments, such as the VLP, LNP, liposomes and organic polymer-based particles described supra, the payload is incorporated within the particle, e.g., within a lumen of the particle. Alternatively, or in addition, the payload may be incorporated into the membrane or shell of the particle, or attached to the particle using covalent or non-covalent attachment.

[0139] In some embodiments, the glycoprotein particle comprises a payload conjugated to the glycoprotein particle. In some embodiments, for example, a glycoprotein particle comprises an inorganic particle conjugated to a fluorophore or other imaging moiety for diagnostic use.

### ENUMERATED EMBODIMENTS

[0140] The invention may be defined by reference to the following sets of enumerated, illustrative embodiments:

### Set I:

[0141] Embodiment I-1. A particle comprising a glycoprotein as set forth in any one of the sequences of Table 1, a sequence comprising at least 70% identity thereto (variant), or a fragment thereof.

[0142] Embodiment I-2. The particle of embodiment I-1, wherein the particle is a microparticle.

[0143] Embodiment I-3. The particle of embodiment I-1, wherein the particle is a nanoparticle.

[0144] Embodiment I-4. The particle of embodiment I-1, wherein the particle comprises one or more of fullerenes, metals, biological polymers, dendrimers, quantum dots, lipids, nucleic acid vectors, and viral structural proteins.

[0145] Embodiment I-5. The particle of embodiment I-3, wherein the particle is a polymeric nanoparticle.

[0146] Embodiment I-6. The particle of embodiment I-5, wherein the polymeric nanoparticle comprises a nanocapsule or a nanosphere.

[0147] Embodiment I-7. The method of embodiment I-5, wherein the polymeric nanoparticle comprises a polymer micelle.

[0148] Embodiment I-8. The particle of any one of embodiments I-1 to I-7, wherein the particles are non-toxic and/or biodegradable.

[0149] Embodiment I-9. The particle of any one of embodiments I-1 to I-3, wherein the particle is a lipid-based particle.

[0150] Embodiment I-10. The particle of embodiment I-9, wherein the lipid-based particle comprises a lipid micelle or a liposome.

[0151] Embodiment I-11. The particle of embodiment I-1, wherein the particle is a viral vector.

[0152] Embodiment I-12. The particle of embodiment I-1, wherein the particle is a virus-like particle (VLP).

[0153] Embodiment I-13. The particle of embodiment I-12, wherein the VLP is derived from a virus selected from the group consisting of adeno-associated virus (AAV), adenovirus, retrovirus and herpes simplex virus.

[0154] Embodiment I-14. The particle of embodiment I-13, wherein the retrovirus comprises an Orthoretrovirinae virus or a Spumaretrovirinae virus.

[0155] Embodiment I-15. The particle of embodiment I-14, wherein the Orthoretrovirinae virus is selected from the group consisting of an Alpharetrovirus, Betaretrovirus, Deltaretrovirus, Epsilonretrovirus, Gammaretrovirus, and Lentivirus.

[0156] Embodiment I-16. The particle of embodiment I-14, wherein the Spumaretrovirinae virus is selected from the group consisting of Bovispumavirus, Equispumavirus, Felispumavirus, Prosimiispumavirus, Simiispumavirus, or Spumavirus.

[0157] Embodiment I-17. The particle of any one of embodiments I-1 to I-16, wherein the glycoprotein, variant, or fragment thereof is expressed on the surface of the particle.

[0158] Embodiment I-18. The particle of embodiment I-17, wherein the glycoprotein enhances targeting of the particle to a cell or tissue.

[0159] Embodiment I-19. The particle of embodiment I-18, wherein the targeting is in vitro.

[0160] Embodiment I-20. The particle of embodiment I-18, wherein the targeting is in vivo.

[0161] Embodiment I-21. The particle of any one of embodiments I-1 to I-20, wherein the particle comprises a payload.

[0162] Embodiment I-22. The particle of embodiment I-21, wherein the payload is a protein, nucleic acid, cell, or small molecule.

[0163] Embodiment I-23. The particle of embodiment I-21, wherein the payload is a diagnostic.

[0164] Embodiment I-24. A pharmaceutical composition comprising any one or more of particles of embodiments I-1 to I-22.

[0165] Embodiment I-25. A method of treating a subject in need thereof, comprising administering to the subject the particle of any one of embodiments I-1 to I-22.

### Set II:

[0166] Embodiment II-1. A glycoprotein particle comprising a particle and a glycoprotein, wherein the glycoprotein is any one of the sequences of SEQ ID NOS: 1-224, 281-284, or 286-573 as set forth in Table 1, a sequence comprising at least 70%, at least 80%, at least 90%, at least 95%, at least 96%, at least 97%, at least 98%, or at least 99% identity thereto, or a fragment thereof.

[0167] Embodiment II-2. The glycoprotein particle of embodiment II-1, wherein the glycoprotein consists of any one of SEQ ID NOS: 1-224, 281-284, or 286-573 as set forth in Table 1.

[0168] Embodiment II-3. The glycoprotein particle of embodiment II-1, wherein the glycoprotein fragment is a virion surface domain.

[0169] Embodiment II-4. The glycoprotein particle of embodiment II-1, wherein the particle is a microparticle.

[0170] Embodiment II-5. The glycoprotein particle of embodiment II-1, wherein the particle is a nanoparticle.

[0171] Embodiment II-6. The glycoprotein particle of embodiment II-1, wherein the particle comprises one or more of fullerenes, metals, biological polymers, dendrimers, quantum dots, lipids, nucleic acid vectors, and viral structural proteins.

[0172] Embodiment II-7. The glycoprotein particle of embodiment II-5, wherein the particle is a polymeric nanoparticle.

[0173] Embodiment II-8. The glycoprotein particle of embodiment II-7, wherein the polymeric nanoparticle comprises a nanocapsule or a nanosphere.

[0174] Embodiment II-9. The glycoprotein particle of embodiment II-7, wherein the polymeric nanoparticle comprises a polymer micelle.

[0175] Embodiment II-10. The glycoprotein particle of any one of embodiments II-1 to II-9, wherein the particle is non-toxic and/or biodegradable.

[0176] Embodiment II-11. The glycoprotein particle of any one of embodiments II-1 to II-5, wherein the particle is a lipid-based particle.

[0177] Embodiment II-12. The glycoprotein particle of embodiments II-1 to II-3, wherein the particle is a virus-like particle (VLP).

[0178] Embodiment II-13. The glycoprotein particle of embodiment II-12, wherein the VLP is derived from a virus selected from the group consisting of retrovirus, adeno-associated virus (AAV), adenovirus, and herpes simplex virus.

[0179] Embodiment II-14. The glycoprotein particle of embodiment II-13, wherein the retrovirus is an Orthoretrovirinae virus or a Spumaretrovirinae virus.

[0180] Embodiment II-15. The glycoprotein particle of embodiment II-14, wherein the Orthoretrovirinae virus is selected from the group consisting of an Alpharetrovirus, Betaretrovirus, Deltaretrovirus, Epsilonretrovirus, Gammaretrovirus, and Lentivirus.

[0181] Embodiment II-16. The glycoprotein particle of embodiment II-14, wherein the Spumaretrovirinae virus is selected from the group consisting of Bovispumavirus, Equispumavirus, Felispumavirus, Prosimiispumavirus, Simiispumavirus, or Spumavirus.

[0182] Embodiment II-17. The glycoprotein particle of embodiments II-1 to II-3, wherein the particle is an exosome.

[0183] Embodiment II-18. The glycoprotein particle of any one of embodiments II-1 to II-3, or II-12 to II-17, wherein the glycoprotein is expressed in a host cell and is trafficked to the host cell membrane prior to formation of the glycoprotein particle.

[0184] Embodiment II-19. The glycoprotein particle of embodiments II-1 to II-3, wherein the particle comprises a lipid nanoparticle (LNP).

[0185] Embodiment II-20. The glycoprotein particle of any one of embodiments II-1 to II-19, wherein the glycoprotein is incorporated into a membrane of the particle.

[0186] Embodiment II-21. The glycoprotein particle of any one of embodiments II-1 to II-20, wherein the glycoprotein particle comprises an organic polymer-based particle.

[0187] Embodiment II-22. The glycoprotein particle of any one of embodiments II-1 to II-21, wherein the particle comprises an inorganic nanoparticle.

[0188] Embodiment II-23. The glycoprotein particle of any one of embodiment II-1 to II-22, wherein the glycoprotein is conjugated to the surface of the particle.

[0189] Embodiment II-24. The glycoprotein particle of embodiment II-23, wherein the conjugation comprises covalent attachment or non-covalent attachment.

[0190] Embodiment II-25. The glycoprotein particle of embodiments II-1 to II-24, wherein the glycoprotein particle comprises a payload.

[0191] Embodiment II-26. The glycoprotein particle of embodiment II-25, wherein inclusion of the glycoprotein in the glycoprotein particles enhances delivery of the payload to a cell or tissue compared to an equivalent particle that does not comprise the glycoprotein.

[0192] Embodiment II-27. The glycoprotein particle of embodiments II-24 to II-26, wherein the payload comprises a protein, nucleic acid, small molecule, or a combination thereof.

[0193] Embodiment II-28. The glycoprotein particle of embodiments II-25 to II-27, wherein the payload is a therapeutic payload.

[0194] Embodiment II-29. The glycoprotein particle of embodiment II-28, wherein delivery of the therapeutic payload to a cell or a tissue of a subject treats a disease or disorder in the subject.

[0195] Embodiment II-30. The glycoprotein particle of embodiment II-28 or II-29, wherein the therapeutic payload comprises a protein or an oligonucleotide.

[0196] Embodiment II-31. The glycoprotein particle of embodiment II-30, wherein the oligonucleotide comprises a sequence encoding a protein.

[0197] Embodiment II-32. The glycoprotein particle of embodiment II-30 or II-31, wherein the protein comprises a cytokine, growth factor, interleukin, enzyme, receptor, microprotein, hormone, RNAse, DNAse, blood clotting factor, anticoagulant, bone morphogenetic protein, engineered protein scaffold, thrombolytics, antibody, antibody fragment, antibody fusion protein, transcription factor, viral interferon antagonist, tick protein, or engineered therapeutic protein.

[0198] Embodiment II-33. The glycoprotein particle of embodiment II-30, wherein the oligonucleotide comprises a single-stranded antisense oligonucleotide (ASO), double-stranded RNA interference (RNAi) molecule, DNA aptamer, RNA aptamer, microRNA, ribozyme, RNA decoy, or circular RNA.

[0199] Embodiment II-34. The glycoprotein particle of embodiments II-25 to II-27, wherein the payload is a diagnostic payload.

[0200] Embodiment II-35. The glycoprotein particle of any one of embodiments II-25 to II-27, wherein the payload comprises a gene editing system.

[0201] Embodiment II-36. The glycoprotein particle of embodiment II-35, wherein the gene editing system comprises a Class 2, Type II CRISPR/Cas system, a Class 2, Type V CRISPR/Cas system, a zinc finger nuclease or a TALEN.

[0202] Embodiment II-37. The glycoprotein particle of embodiment II-36, wherein the Class 2, Type II CRISPR/Cas system comprises Cas9.

[0203] Embodiment II-38. The glycoprotein particle of embodiment II-36, wherein the Class 2, Type V CRISPR/Cas system comprises one or more of CasX, Cas12a (Cpf1), Cas12b (C2c1), Cas12c (C2c3), Cas12d (CasY), Cas12e (CasX), Cas12f, Cas12g, Cas12h, Cas12i, Cas12j, Cas12k, Cas14, and/or CasΦ.

[0204] Embodiment II-39. The glycoprotein particle of embodiment II-38, wherein the Class 2, Type V CRISPR/Cas system comprises a gene editing pair comprising a CasX protein comprising an amino acid sequence with at least 90% identity to any one of SEQ ID NOS: 574-944, or as set forth in Table 2, and a guide RNA (gRNA) comprising a scaffold comprising a nucleic acid sequence with at least 90% identity to any one of SEQ ID NOS: 945-1141, or as set forth in Table 3.

[0205] Embodiment II-40. The glycoprotein particle of any one of embodiments II-25 to II-30, wherein the payload comprises a gene editing pair comprising a CasX protein of any one of SEQ ID NOS: 574-944, or as set forth in Table 2, and a guide RNA comprising a scaffold of any one of SEQ ID NOS: 945-1141, or as set forth in Table 3.

[0206] Embodiment II-41. The glycoprotein particle of embodiment II-39 or II-40, wherein the gRNA further comprises a targeting sequence linked to the 3′ end of the gRNA scaffold sequence.

[0207] Embodiment II-42. A pharmaceutical composition comprising a glycoprotein particle of any one of the preceding embodiments and a pharmaceutically acceptable carrier, diluent, or excipient.

[0208] Embodiment II-43. A method of treating a subject in need thereof, comprising administering to a subject in need thereof, a glycoprotein particle of any one of embodiments II-1 to II-41 or the pharmaceutical composition of embodiment II-42.

[0209] Embodiment II-44. The method of embodiment II-43, wherein the subject has a disease or disorder selected from the group consisting of cancer, an immunoregulatory disease, a pulmonary disease or disorder, a cardiovascular disease, an infectious disease, a genetic disease or disorder, a neurological disease or disorder, an endocrine disease or disorder, a metabolic disease or disorder, an intestinal disease or disorder, a mental illness, a sexually transmitted disease, a gynecological disease, an urogenital disease, a skin disease, or an ocular disease.

[0210] Embodiment II-45. The method of embodiment II-43 or II-44, wherein administration of the glycoprotein particle or pharmaceutical composition reduces a sign or a symptom of the disease or disorder.

### EXAMPLES

### Example 1: Construction of a Glycoprotein Particle Comprising a Viral-Like Nanoparticle Delivery System to Evaluate Tropism of Glycoproteins in Mouse Neural Progenitor Cells

[0211] Retroviral (e.g., lentiviral) vectors were constructed with an envelope protein of vesicular stomatitis virus (VSV-G), a glycoprotein that endows both a broad host cell range and high vector particle stability. Studies were performed in which viral-like nanoparticle delivery systems incorporated an example payload of a Ribonucleic Protein (RNP) comprising a CasX protein and a guide RNA (gRNA) specific for editing tdTomato in mouse neural progenitor cells (tdT NPCs). These particle delivery systems were created with varying concentrations of VSV-G to determine their effects on delivery to the NPC via the readout of tdTomato expression.

[0212] To determine the effects of varying concentrations of the pseudotyping (VSV-G) plasmid, VSV-G was incorporated into the particle delivery system as follows: 1 μg of the VSV-G plasmid was used for the 100% VSV-G group, 0.3 μg was used for the 30% VSV-G group, 0.1 μg was used for the 10% VSV-G group, 0.03 μg was used for the 3% VSV-G group, 0.01 μg was used for the 1% VSV-G group, and 0.003 μg was used for the 0.3% VSV-G group. Titering of the viral particles produced was done using the Takara p24 rapid titer kit. Editing was assessed in the tdTomato NPC cells.

[0213] The results for the 10% and 30% VSV-G groups trend towards a better editing outcome as compared to the 100% VSV-G group, as shown in FIG. 1, without affecting viral titer or stability.

[0214] As the results indicate, under the experimental conditions, the same or higher editing with 10-30% VSV-G is achieved relative to the 100% VSV-G group. This result opened the possibility of pseudotyping the delivery particle with additional glycoproteins, either with or without VSV-G, to confer differential or enhanced cellular tropism.

[0215] Each viral particle transfection used 3.3 μg (0.467 pM) of psPax2 plasmid, 19.8 μg (3.24 pM) of pStx43.119 plasmid, 5 μg (3.13 pM) of pStx42 plasmid targeting the tdTomato locus using spacer 12.7 and 0.262 pM of the respective glycoprotein(s) plasmid which varied in molecular weight. Glycoprotein plasmids contained the same backbone pGP2 and only varied by expressing different viral envelope proteins. Canonical HSV-1 pseudotyping requires four glycoproteins which were used in equimolar amounts in this assay (Polpitiya Arachchige, S., Henke, W., Kalamvoki, M. et al. Analysis of herpes simplex type 1 gB, gD, and gH/gL on production of infectious HIV-1: HSV-1 gD restricts HIV-1 by exclusion of HIV-1 Env from maturing viral particles. Retrovirology 16:9 (2019)). Glycoprotein amino acid sequences come from wild type viral sequences.

[0216] It was also assessed whether pseudotyping with different viral glycoproteins could have an impact on overall size distributions (FIG. 2), which could, in turn, have an impact on in vivo editing efficiencies in different tissues of interest. For this study, the rabies pseudotyped viral particle 10× and VSV-G pseudotyped viral particle 1× were produced using the protocol described above scaled to a 6 well format and using pGP29 in place of the VSV-G pGP2 plasmid. All plasmid quantities and cells used were scaled down 8-fold. The VSV-G pseudotyped viral particle 1× were generated as described above. These preparations were then concentrated at 20,000×g at 4° C. for 90 minutes without a sucrose buffer. Lentivirus was transfected with the following plasmid weights: 5.4 μg of psPax2, 1.8 μg of pGP2, and 7.2 μg of pStx34.119.174.12.7, generating lentivirus designed to induce production and incorporation of RNP with the same enzymatic capabilities as VSV-G pseudotyped viral particle 1×. Samples were diluted appropriately for analysis. The size and number of particles were assessed using a Tunable Resistive Pulse Sensor (Izon Biosciences qNano Gold). While both rabies and VSV-G viral particles ranged in size from 75-140 nm, lentiviruses (LVs) tended to be a bit larger, ranging in size from 85-160 nm, as shown in FIG. 2.

### Example 2: Enhancing Tropism and Editing Potency with Glycoprotein Particles Comprising Vesiculovirus (VSV-G) Glycoprotein Variants

[0217] The purpose of these studies was to evaluate the ability of a variety glycoprotein variants to enhance tropism for target cells and improve overall editing of a VLP relative to the standard control VSV-G glycoprotein. VSV-G has been widely used to pseudotype viral vectors. However, VSV-G has been shown to be susceptible to human complement inactivation. Studies were conducted to demonstrate that VSV-G viral particles (with a guide scaffold targeting TdTomato) could be effectively pseudotyped with envelope glycoproteins derived from other species within the Vesiculovirus genus to produce potent particles that successfully edited target cells. This was hypothesized to provide several advantages: 1) some of the variant glycoproteins may be relatively resistant to complement inactivation with human serum; 2) these variant glycoproteins may exhibit enhanced tropism; and 3) viral particles pseudotyped with different glycoproteins may enable repeated dosing of the therapeutic modality, in which different glycoproteins circumvent the humoral immune response induced by the original glycoprotein.

[0218] The viral particle was effectively pseudotyped with envelope glycoproteins derived from other species within the Vesiculovirus genus to produce potent particles that successfully edited the target cell (tdT NPCs). In particular, several glycoproteins, including pGP101, pGP100, 99, 98, 95, 93, 91 and 88 (Table 4) showed promise for enhanced tropism and editing capability of the viral particle (FIGS. 4-9).

[0219] Example configurations of the glycoprotein sequences within the plasmids are shown in FIGS. 3, 10, and 11.

### Example 3: Enhancing Tropism and Editing Potency with Glycoprotein Particles Comprising Lentiviral and Alphavirus Glycoprotein Variants

[0220] The purpose of these studies was to evaluate the ability of diverse glycoprotein variants to enhance the tropism of target cells and improve overall editing of viral particles based on lentiviral and Alphaviral constructs bearing the glycoprotein variants.

[0221] Vesicular stomatitis virus envelope glycoprotein (VSV-G) has been widely used to pseudotyped viral vectors. However, VSV-G has been shown to be susceptible to human complement inactivation. Studies were conducted to demonstrate that viral-like particles derived from lentiviral based HIV (V168 with scaffold 226 targeting TdTomato) as well as other retroviruses such as ALV (V44 and V102 with scaffold 174 targeting TdTomato) were effectively pseudotyped with envelope glycoproteins derived from other viral families including but not limited to Togaviridae, Paramyxoviridae, Rhabdoviridae, Orthomyxoviridae, Retroviridae and Flaviviridae to produce potent particles that successfully edited target cells (FIGS. 12-21). Encoding sequences for these pseudotyped viral-like particles are provided in Table 4. The designed constructs were synthesized as transgenes and purchased pre-cloned into pTWIST expression plasmids from Twist Biosciences. The resultant plasmids were sequenced using Sanger sequencing to ensure correct assembly.

TABLE 4
Plasmid sequences for structural plasmids and glycoproteins

| | viral-like | SEQ |
|---|---|---|
| | Plasmid | ID |
| Version number/Viral source | number | NO |
| H5N1 | pGP80 | 225 |
| H7N9 | pGP81 | 226 |
| Eastern equine encephalitis virus (EEEV) | pGP65 | 227 |
| Venezuelan equine encephalitis viruses (VEEV) | pGP66 | 228 |
| Western equine encephalitis virus (WEEV) | pGP67 | 229 |
| Semliki Forest virus | pGP68 | 230 |
| Sindbis virus | pGP69 | 231 |
| Chikungunya virus (CHIKV) | pGP70 | 232 |
| Bornavirus BoDV-1 | pGP58 | 233 |
| Tick-borne encephalitis virus (TBEV) | pGP71 | 234 |
| Rabies virus (strain Nishigahara RCEH) (RABV) | pGP29.3 | 235 |
| Rabies virus (strain India) (RABV) | pGP29.4 | 236 |
| Rabies virus (strain CVS-11) (RABV) | pGP29.5 | 237 |
| Rabies virus (strain ERA) (RABV) | pGP29.6 | 238 |
| Rabies virus (strain SAD B19) (RABV) | pGP29.7 | 239 |
| Rabies virus (strain Vnukovo-32) (RABV) | pGP29.8 | 240 |
| Rabies virus (strain Pasteur vaccins/PV) (RABV) | pGP29.9 | 241 |
| Rabies virus (strain PM1503/AVO1) (RABV) | pGP29.1 | 242 |
| Rabies virus (strain China/DRV) (RABV) | pGP29.11 | 243 |
| Rabies virus (strain China/MRV) (RABV) | pGP29.12 | 244 |
| Rabies virus (isolate Human/Algeria/1991) (RABV) | pGP29.13 | 245 |
| Rabies virus (strain HEP-Flury) (RABV) | pGP29.14 | 246 |
| Rabies virus (strain silver-haired bat-associated) | pGP29.15 | 247 |
| (RABV) (SHBRV) | | |
| Codon optimized rabies virus | pGP29.2 | 248 |
| Rabies Virus | pGP29 | 249 |
| Mokola Virus | pGP30 | 250 |
| Measles Virus | pGP32.1 | 251 |
| Measles Virus | pGP32.2 | 252 |
| Mouse mammary tumor virus | pGP6 | 253 |
| Human T-lymphotropic virus 1 | pGP7 | 254 |
| RD114 Endogenous Feline Retrovirus | pGP8 | 255 |
| Gibbon ape leukemia virus | pGP9 | 256 |
| Moloney Murine leukemia virus | pGP10 | 257 |
| Baboon Endogenous Virus | pGP11 | 258 |
| Human Foamy Virus | pGP12 | 259 |
| Ebola Zaire Virus | pGP41 | 260 |
| Dengue | pGP25 | 261 |
| Zika virus | pGP26 | 262 |
| West Nile Virus | pGP27 | 263 |
| Japanese Encephalitis Virus | pGP28 | 264 |
| Mumps Virus F | pGP31.1 | 265 |
| Mumps Virus HN | pGP31.2 | 266 |
| Sendai Virus F | pGP33.1 | 267 |
| Sendai Virus HN | pGP33.2 | 268 |
| AcMNPV gp64 | pGP59 | 269 |
| Ross River Virus | pGP54 | 270 |
| N1 Neuraminidase | pGP82 | 271 |
| Dengue virus 2 | pGP75 | 272 |
| Dengue virus 3 | pGP76 | 273 |
| Dengue virus 4 | pGP77 | 274 |
| Nipah Virus | pGP34.1 | 275 |
| Nipah Virus | pGP34.2 | 276 |
| Hendra Virus | pGP35.1 | 277 |
| Hendra Virus | pGP35.2 | 278 |
| Newcastle disease virus | pGP37.1 | 279 |
| Newcastle disease virus | pGP37.2 | 280 |

### Example 4: Screen of Glycoprotein Particles Comprising Pseudotyped Viral Like Particles to Evaluate Tropism of Glycoproteins and Gene Editing Capabilities

[0222] The purpose of these experiments was to test whether the cellular tropism of viral-like particles (also referred to herein as XDPs) based on HIV could be altered by pseudotyping the viral-like particles with various viral-derived glycoproteins as targeting moieties.

### Identification of Candidate Glycoproteins

[0223] Glycoproteins belonging to a variety of species within the Vesiculovirus, Alphavirus genus, Lyssavirus, and γ-retrovirus genuses were screened for transduction efficiency. The amino acid sequences of the glycoproteins tested are provided in Table 1, above.

[0224] Vesiculovirus species glycoprotein investigated herein include Alagoas vesiculovirus, American bat vesiculovirus, Carajas vesiculovirus, Chandipura vesiculovirus, Cocal vesiculovirus, Indiana vesiculovirus, Isfahan vesiculovirus, Jurona vesiculovirus, Malpais Spring vesiculovirus, Maraba vesiculovirus, Morreton vesiculovirus, New Jersey vesiculovirus, Perinet vesiculovirus, Piry vesiculovirus, Radi vesiculovirus, Yug Bogdanovac vesiculovirus, Indiana virus, and New Jersey vesiculovirus. Alagoas vesiculoviruses are known to infect cattle, horses, and pigs. Isfahan vesiculovirus, Chandipura vesiculovirus and Piry vesiculovirus have also been reported to infect humans to cause a flu-like illness.

[0225] Alphavirus species glycoproteins investigated herein include Eastern equine encephalitis virus (EEEV), Venezuelan equine encephalitis viruses (VEEV), Western equine encephalitis virus (WEEV), Semliki Forest virus, Sindbis virus and Chikungunya virus (CHIKV). Alphavirus are mostly mosquito-borne viruses known to infect humans, non-human primates, equids, birds, amphibians, reptiles, rodents, and pigs.

[0226] Lyssavirus species glycoproteins investigated herein include Rabies and Mokola. γ-retrovirus glycoproteins investigated herein include BABV, GALV and RD114.

### Method for the Generation of VLPs Containing CasX Gene Editing Systems (XDPs)

[0227] The screen of glycoproteins was conducted using a five-plasmid system for generating XDPs, using the configurations outlined in Table 5, below.

TABLE 5
Plasmid configurations for generating XDPs

| Plasmid | Encoded Components** |
|---|---|
| 1 | MA*-CA*-NC*-p1/p6-MS2 protein |
| 2 | MA*-CA*-NC*-p1/p6*-Pro† |
| 3 | CasX 676 |
| 4 | Glycoprotein |
| 5 | Single guide RNA, with MS2 tag |

*indicates cleavage sequence between adjacent components
**5′ to 3′ orientation
†indicates a -1 frame-shift in the encoded construct (Gag-TFR-PR polyprotein)

[0228] The XDPs were designed to contain ribonucleoproteins (RNP) of CasX 676 complexed with single guide RNA variant 251 having spacer sequence 12.7 targeted to tdTomato (encoded by CTGCATTCTAGTTGTGGTTT, SEQ ID NO: 285) or spacer sequence 7.37 targeted to human beta 2 microglobulin (B2M). Utilizing methods described in the sections below, the XDPs were produced by transient transfection of LentiX HEK293T cells (Takara Biosciences) with two structural plasmids encoding components of the Gag-pol HIV-1 system, a plasmid encoding a pseudotyping glycoprotein, and a plasmid encoding the guide RNA. For the plasmid encoding the guide RNAs, the pStx42 plasmid was created with a human U6 promoter upstream of the guide RNA cassette A plasmid encoding a glycoprotein for pseudotyping the XDP was also used. All plasmids contained either an ampicillin or kanamycin resistance gene, were generated using standard molecular biology techniques, and were sequenced using Sanger sequencing to ensure correct assembly.

### Cell Culture and Transfection

[0229] HEK293T Lenti-X cells were maintained in 10% FBS supplemented DMEM with HEPES and Glutamax (Thermo Fisher). Cells were seeded in 15 cm dishes at 20×10⁶ cells per dish in 20 mL of media. Cells were allowed to settle and grow for 24 hours before transfection. At the time of transfection, cells were 70-90% confluent. For transfection, the XDP structural plasmids and the plasmid encoding CasX were used in amounts ranging from 13 to 80.0 μg. The structural plasmids and the plasmid encoding CasX were added at a ratio of 10:45:45 for plasmid 1:plasmid 2:plasmid 3. Each transfection also received 13 μg of the plasmid encoding the sgRNA and 0.25 μg of a plasmid encoding a glycoprotein. Polyethylenimine (PEI Max, Polyplus) was then added to the plasmid mixture, mixed, and allowed to incubate at room temperature before being added to the cell culture.

### Collection and Concentration of XDPs

[0230] Media was aspirated from the plates 24 hours post-transfection and replaced with Opti-MEM (Thermo Fisher). XDP-containing media was collected 72 hours post-transfection and filtered through a 0.45 μm PES filter. The supernatant was concentrated and purified via centrifugation at 10,000×g at 4° C. for 4h using a 10% sucrose buffer in NTE (50 mM Tris-HCL, 100 mM NaCl, 10% Sucrose, pH 7.4).

[0231] Pellets were either resuspended in Storage Buffer (PBS+113 mM NaCl, 15% Trehalose dihydrate, pH 8 or an appropriate media by gentle trituration and vortexing. XDPs were resuspended in 300 μL of DMEM/F12 supplemented with glutamax, HEPES, non-essential amino acids, Pen/Strep, 2-mercaptoethanol, B-27 without vitamin A, and N2.

### Transduction

[0232] For the experiments, XDPs were transduced into either mouse tdTomato neural progenitor cells, Jurkat T cells, human neural progenitor cells, or human astrocytes.

[0233] tdTomato neural progenitor cells (tdT NPCs) were grown in DMEM/F12 supplemented with glutamax, HEPES, non-essential amino acids, Pen/Strep, 2-mercaptoethanol, B-27 without vitamin A, and N2. Cells were harvested using StemPro Accutase Cell Dissociation Reagent and seeded on PLF coated 96-well plates. Cells were allowed to grow for 48 hours before being treated for targeting XDPs (having a spacer for tdTomato) starting with neat-resuspended virus and proceeding through 5 half-log dilutions. Cells were then centrifuged for 15 minutes at 1000×g. NPCs were grown for 96 hours before analysis of fluorescence as a marker of editing of tdTomato.

[0234] Human NPCs were grown in DMEM/F12 supplemented with glutamax, HEPES, non-essential amino acids, Pen/Strep, 2-mercaptoethanol, B-27 without vitamin A, and N2. Cells were harvested using StemPro Accutase Cell Dissociation Reagent and seeded on PLF coated 96-well plates. Cells were allowed to grow for 24 hours before being treated for targeting XDPs (having a spacer for tdTomato) starting with neat-resuspended virus and proceeding through 10 half-log dilutions. Cells were then centrifuged for 15 minutes at 1000×g. Human NPCs were grown for 96 hours before analysis of B2M editing by flow. The assays were run 2 times for each sample with similar results. Human astrocytes were similarly treated.

[0235] Jurkat cells were grown in RPMI supplemented with FBS. 20,000 cells were transduced with the targeting XDPs (having a spacer for tdTomato) starting with neat-resuspended virus and proceeding through 10 half-log dilutions. Cells were then centrifuged for 15 minutes at 1000×g. Jurakts were grown for 96 hours before analysis of B2M editing by flow. The assays were run 2 times for each sample with similar results.

[0236] tdTomato fluorescence and editing of the B2M locus was measured using flow cytometry. To measure B2M editing, 4′,6-diamidino-2-phenylindole (DAPI) staining was used to mark dead cells, and the PE-Cy7 Mouse Anti-Human HLA-ABC staining kit (BD Pharmingen) was used to stain major the histocompatibility complex, class I. Expression of this complex at the cell surface is blocked by B2M knockout. The assays were run 2-3 times for each sample, with similar results.

### Results

[0237] VSV-G-mediated cell entry occurs by binding to the low-density lipoprotein receptor (LDL-R), which is a ubiquitous receptor found on most cell types. Accordingly, the tropism of XDPs pseudotyped with VSV-G is broad. In order to alter the tropism of XDPs relative to XDPs pseudotyped with VSV-G, XDPs were generated with diverse viral glycoproteins as targeting moieties. These XDPs were transduced into mouse tdTomato neural progenitor cells (NPCs), Jurkat T cells, human NPCs, or human astrocytes, and editing of the tdTomato or human B2M locus was measured to determine differences in tropism conferred by the different glycoproteins (FIGS. 22-25). For example, it was expected that the glycoproteins from neurotropic viruses, such as alphaviruses and lyssaviruses, would display tropism for neuronal cells over other cell types, such as Jurkat cells.

[0238] A comparison of the mouse and human NPC editing data revealed that the XDPs did not edit mouse and human NPCs at the same levels. Specifically, almost all of the XDPs with vesiculoviral glycoproteins showed a higher level of editing in mouse NPCs (FIG. 22) than they did in human NPCs (FIG. 23). XDPs with alphaviral glycoproteins showed a higher level of editing in human NPCs than in mouse NPCs. Interestingly, XDPs with rabies glycoprotein showed a higher level of editing in mouse NPCs than in human NPCs. Conversely, XDPs with Mokola glycoprotein showed a higher level of editing in human NPCs than in mouse NPCs.

[0239] Additionally, XDPs with certain glycoproteins belonging to the vesiculoviral family (including PERV, YBV, JURV, PIRYV, RADV and CHIPV) showed higher levels of editing in human astrocytes (FIG. 24) than in human NPCs (FIG. 23). This finding may be particularly useful to skew XDP tropism towards glial cells rather than neurons, which would be beneficial for glial cell targets.

[0240] Finally, the level of editing of the B2M locus was measured in Jurkat cells, a human T lymphocyte cell line. Only XDPs with certain glycoproteins belonging to the vesiculoviral family showed a higher level of editing in Jurkat cells (FIG. 25), with minimal editing in Jurkat cells exhibited by XDPs with glycoproteins belonging to lyssaviruses, alphaviruses, paramyxoviruses and retroviruses.

[0241] The results of the experiments support that viral glycoproteins can be selectively utilized in glycoprotein particles to preferentially confer tropism on cells intended for gene editing.

What is claimed is:

1. A glycoprotein particle comprising a particle and a glycoprotein, wherein the glycoprotein is any one of the sequences of SEQ ID NOS: 1-224, 281-284, or 286-573 as set forth in Table 1, a sequence comprising at least 70%, at least 80%, at least 90%, at least 95%, at least 96%, at least 97%, at least 98%, or at least 99% identity thereto, or a fragment thereof.

2. The glycoprotein particle of claim 1, wherein the glycoprotein consists of any one of SEQ ID NOS: 1-224, 281-284, or 286-573 as set forth in Table 1.

3. The glycoprotein particle of claim 1, wherein the glycoprotein fragment is a virion surface domain.

4. The glycoprotein particle of claim 1, wherein the particle is a microparticle.

5. The glycoprotein particle of claim 1, wherein the particle is a nanoparticle.

6. The glycoprotein particle of claim 1, wherein the particle comprises one or more of fullerenes, metals, biological polymers, dendrimers, quantum dots, lipids, nucleic acid vectors, and viral structural proteins.

7. The glycoprotein particle of claim 5, wherein the particle is a polymeric nanoparticle.

8. The glycoprotein particle of claim 7, wherein the polymeric nanoparticle comprises a nanocapsule or a nanosphere.

9. The glycoprotein particle of claim 7, wherein the polymeric nanoparticle comprises a polymer micelle.

10. The glycoprotein particle of any one of claims 1-9, wherein the particle is non-toxic and/or biodegradable.

11. The glycoprotein particle of any one of claims 1-5, wherein the particle is a lipid-based particle.

12. The glycoprotein particle of claims 1-3, wherein the particle is a virus-like particle (VLP).

13. The glycoprotein particle of claim 12, wherein the VLP is derived from a virus selected from the group consisting of retrovirus, lentivirus, adeno-associated virus (AAV), adenovirus, and herpes simplex virus.

14. The glycoprotein particle of claim 13, wherein the retrovirus is an Orthoretrovirinae virus or a Spumaretrovirinae virus.

15. The glycoprotein particle of claim 14, wherein the Orthoretrovirinae virus is selected from the group consisting of an Alpharetrovirus, Betaretrovirus, Deltaretrovirus, Epsilonretrovirus, Gammaretrovirus, and Lentivirus.

16. The glycoprotein particle of claim 14, wherein the Spumaretrovirinae virus is selected from the group consisting of Bovispumavirus, Equispumavirus, Felispumavirus, Prosimiispumavirus, Simiispumavirus, or Spumavirus.

17. The glycoprotein particle of claims 1-3, wherein the particle is an exosome.

18. The glycoprotein particle of any one of claim 1-3, or 12-17, wherein the glycoprotein is expressed in a host cell and is trafficked to the host cell membrane prior to formation of the glycoprotein particle.

19. The glycoprotein particle of claims 1-3, wherein the particle comprises a lipid nanoparticle (LNP).

20. The glycoprotein particle of any one of claims 1-19, wherein the glycoprotein is incorporated into a membrane of the particle.

21. The glycoprotein particle of any one of claims 1-20, wherein the glycoprotein particle comprises an organic polymer-based particle.

22. The glycoprotein particle of any one of claims 1-21, wherein the particle comprises an inorganic nanoparticle.

23. The glycoprotein particle of any one of claim 1-22, wherein the glycoprotein is conjugated to the surface of the particle.

24. The glycoprotein particle of claim 23, wherein the conjugation comprises covalent attachment or non-covalent attachment.

25. The glycoprotein particle of claims 1-24, wherein the glycoprotein particle comprises a payload.

26. The glycoprotein particle of claim 25, wherein inclusion of the glycoprotein in the glycoprotein particles enhances delivery of the payload to a cell or tissue compared to an equivalent particle that does not comprise the glycoprotein.

27. The glycoprotein particle of claims 24-26, wherein the payload comprises a protein, a nucleic acid, a small molecule, or a combination thereof.

28. The glycoprotein particle of claims 25-27, wherein the payload is a therapeutic payload.

29. The glycoprotein particle of claim 28, wherein delivery of the therapeutic payload to a cell or a tissue of a subject treats a disease or disorder in the subject.

30. The glycoprotein particle of claim 28 or 29, wherein the therapeutic payload comprises a protein or an oligonucleotide.

31. The glycoprotein particle of claim 30, wherein the oligonucleotide comprises a sequence encoding a protein.

32. The glycoprotein particle of claim 30 or 31, wherein the protein comprises a cytokine, growth factor, interleukin, enzyme, receptor, microprotein, hormone, RNAse, DNAse, blood clotting factor, anticoagulant, bone morphogenetic protein, engineered protein scaffold, thrombolytics, antibody, antibody fragment, antibody fusion protein, transcription factor, viral interferon antagonist, tick protein, or engineered therapeutic protein.

33. The glycoprotein particle of claim 30, wherein the oligonucleotide comprises a single-stranded antisense oligonucleotide (ASO), double-stranded RNA interference (RNAi) molecule, DNA aptamer, RNA aptamer, microRNA, ribozyme, RNA decoy, or circular RNA.

34. The glycoprotein particle of claims 25-27, wherein the payload is a diagnostic payload.

35. The glycoprotein particle of any one of claims 25-27, wherein the payload comprises a gene editing system.

36. The glycoprotein particle of claim 35, wherein the gene editing system comprises a Class 2, Type II CRISPR/Cas system, a Class 2, Type V CRISPR/Cas system, a zinc finger nuclease or a TALEN.

37. The glycoprotein particle of claim 36, wherein the Class 2, Type II CRISPR/Cas system comprises Cas9.

38. The glycoprotein particle of claim 36, wherein the Class 2, Type V CRISPR/Cas system comprises one or more of CasX, Cas12a (Cpf1), Cas12b (C2c1), Cas12c (C2c3), Cas12d (CasY), Cas12e (CasX), Cas12f, Cas12g, Cas12h, Cas12i, Cas12j, Cas12k, Cas12l, Cas14, and/or CasΦ.

39. The glycoprotein particle of claim 38, wherein the Class 2, Type V CRISPR/Cas system comprises a gene editing pair comprising a CasX protein comprising an amino acid sequence with at least 90% identity to any one of SEQ ID NOS: 574-944, or as set forth in Table 2, and a guide RNA (gRNA) comprising a scaffold comprising a nucleic acid sequence with at least 90% identity to any one of SEQ ID NOS: 945-1141, or as set forth in Table 3.

40. The glycoprotein particle of any one of claims 25-30, wherein the payload comprises a gene editing pair comprising a CasX protein of any one of SEQ ID NOS: 574-944, or as set forth in Table 2, and a guide RNA comprising a scaffold of any one of SEQ ID NOS: 945-1141, or as set forth in Table 3.

41. The glycoprotein particle of claim 39 or 40, wherein the gRNA further comprises a targeting sequence linked to the 3′ end of the gRNA scaffold sequence that is complementary to a target nucleic acid.

42. A pharmaceutical composition comprising a glycoprotein particle of any one of the preceding claims and a pharmaceutically acceptable carrier, diluent, or excipient.

43. A method of treating a subject in need thereof, comprising administering to a subject in need thereof, a glycoprotein particle of any one of claims 1-41 or the pharmaceutical composition of claim 42.

44. The method of claim 43, wherein the subject has a disease or disorder selected from the group consisting of cancer, an immunoregulatory disease, a pulmonary disease or disorder, a cardiovascular disease, an infectious disease, a genetic disease or disorder, a neurological disease or disorder, an endocrine disease or disorder, a metabolic disease or disorder, an intestinal disease or disorder, a mental illness, a sexually transmitted disease, a gynecological disease, an urogenital disease, a skin disease, or an ocular disease.

45. The method of claim 43 or 44, wherein administration of the glycoprotein particle or pharmaceutical composition reduces a sign or a symptom of the disease or disorder.

The application's sequence listing, which the Patent Office published only in electronic form, follows.

SEQUENCE LISTING (1177 sequences)

SEQ ID NO: 1 - protein, 511 aa, Vesicular Stomatitis Virus
MKCLLYLAFLFIGVNCKFTIVFPHNQKGNWKNVPSNYHYCPSSSDLNWHNDLIGTALQVKMPKSHKAIQADGWMCHASKWVTTCDFRWYGPKYITHSIRSFTPSVEQCKESIEQTKQGTWLNPGFPPQSCGYATVTDAEAVIVQVTPHHVLVDEYTGEWVDSQFINGKCSNYICPTVHNSTTWHSDYKVKGLCDSNLISMDITFFSEDGELSSLGKEGTGFRSNYFAYETGGKACKMQYCKHWGVRLPSGVWFEMADKDLFAAARFPECPEGSSISAPSQTSVDVSLIQDVERILDYSLCQETWSKIRAGLPISPVDLSYLAPKNPGTGPAFTIINGTLKYFETRYIRVDIAAPILSRMVGMISGTTTERELWDDWAPYEDVEIGPNGVLRTSSGYKFPLYMIGHGMLDSDLHLSSKAQVFEHPHIQDAASQLPDDESLFFGDTGLSKNPIELVEGWFSSWKSSIASFFFIIGLIIGLFLVLRVGIHLCIKLKHTKKRQIYTDIEMNRLGK

SEQ ID NO: 2 - protein, 856 aa, Human Immunodeficiency Virus
MRVKEKYQHLWRWGWRWGTMLLGMLMICSATEKLWVTVYYGVPVWKEATTTLFCASDAKAYDTEVHNVWATHACVPTDPNPQEVVLVNVTENFNMWKNDMVEQMHEDIISLWDQSLKPCVKLTPLCVSLKCTDLKNDTNTNSSSGRMIMEKGEIKNCSFNISTSIRGKVQKEYAFFYKLDIIPIDNDTTSYKLTSCNTSVITQACPKVSFEPIPIHYCAPAGFAILKCNNKTFNGTGPCTNVSTVQCTHGIRPVVSTQLLLNGSLAEEEVVIRSVNFTDNAKTIIVQLNTSVEINCTRPNNNTRKRIRIQRGPGRAFVTIGKIGNMRQAHCNISRAKWNNTLKQIASKLREQFGNNKTIIFKQSSGGDPEIVTHSFNCGGEFFYCNSTQLFNSTWFNSTWSTEGSNNTEGSDTITLPCRIKQIINMWQKVGKAMYAPPISGQIRCSSNITGLLLTRDGGNSNNESEIFRPGGGDMRDNWRSELYKYKVVKIEPLGVAPTKAKRRVVQREKRAVGIGALFLGFLGAAGSTMGAASMTLTVQARQLLSGIVQQQNNLLRAIEAQQHLLQLTVWGIKQLQARILAVERYLKDQQLLGIWGCSGKLICTTAVPWNASWSNKSLEQIWNHTTWMEWDREINNYTSLIHSLIEESQNQQEKNEQELLELDKWASLWNWFNITNWLWYIKLFIMIVGGLVGLRIVFAVLSIVNRVRQGYSPLSFQTHLPTPRGPDRPEGIEEEGGERDRDRSIRLVNGSLALIWDDLRSLCLFSYHRLRDLLLIVTRIVELLGRRGWEALKYWWNLLQYWSQELKNSAVSLLNATAIAVAEGTDRVIEVVQGACRAIRHIPRRIRQGLERILL

SEQ ID NO: 3 - protein, 606 aa, Avian leukosis virus
MEAVIKAFLTGYPGKTSKKDSKEKPLATSKKDPEKTPLLPTRVNYILIIGVLVLCEVTGVRADVHLLEQPGNLWITWANRTGQTDFCLSTQSATSPFQTCLIGIPSPISEGDFKGYVSDNCTTLGTDRLVSSADFTGGPDNSTTLTYRKVSCLLLKLNVSMWDEPHELQLLGSQSLPNITNIAQISGITGGCVGFRPQGVPWYLGWSRQEATRFLLRHPSFSKSTEPFTVVTADRHNLFMGSEYCGAYGYRFWNMYNCSQVGRQYRCGNARSPRPGLPEIQCTRRGGKWVNQSQEINESEPFSFTVNCTASSLGNASGCCGKAGTILPGKWVDSTQGSFTKPKALPPAIFLICGDRAWQGIPSRPVGGPCYLGKLTMLAPKHTDILKVLVNSSRTGIRRKRSTSHLDDTCSDEVQLWGPTARIFASILAPGVAAAQALREIERLACWSVKQANLTTSLLGDLLDDVTSIRHAVLQNRAAIDFLLLAHGHGCEDVAGMCCFNLSDHSESIQKKFQLMKEHVNKIGVDSDPIGSWLRGLFGGIGEWAVHLLKGLLLGLVVILLLVVCLPCLLQIVCGNIRKMINNSISYHTEYKKLQKACGQPESRIV

SEQ ID NO: 4 - protein, 601 aa, Rous Sarcoma Virus
MEAVIKAFLTGYPGKTSKKDSKEKPLATSKKDPEKTPLLPTRVNYILIIGVLVLCEVTGVRADVHLLEQPGNLWITWANRTGQTDFCLSTQSATSPFQTCLIGIPSPISEGDFKGYVSDTNCSTVGTDRLVLSASITGGPDNSTTLTYRKVSCLLLKLNVSMWDEPPELQLLGSQSLPNVTNITQVSGVAGGCVYFAPRATGLFLGWSKQGLSRFLLRHPFTSTSNSTEPFTVVTADRHNLFMGSEYCGAYGYRFWEIYNCSQTRNTYRCGDVGGTGLPETWCRGKGGIWVNQSKEINETEPFSFTANCTGSNLGNVSGCCGEPITILPLGAWIDSTQGSFTKPKALPPAIFLICGDRAWQGIPSRPVGGPCYLGKLTMLAPNHTDILKILANSSRTGIRRKRSVSHLDDTCSDEVQLWGPTARIFASILAPGVAAAQALREIERLACWSVKQANLTTSLLGDLLDDVTSIRHAVLQNRAAIDFLLLAHGHGCEDVAGMCCFNLSDHSESIQKKFQLMKKHVNKIGVDSDPIGSWLRGIFGGIGEWAVHLLKGLLLGLVVILLLLVCLPCLLQFVSSSIRKMINSSINYHTEYRKMQGGAV

SEQ ID NO: 5 - protein, 688 aa, Mouse mammary tumor virus
MPKHQSGSPTDSSDLLLSGKKQRPHLALRRKRRREMRKINRKVPRMNLVPIKEKTAWQHLQALISEAEEVLKTSQTPQTSLTLFLALLSVLGPPPVTGESYWAYLPKPPILHPVGWGSTDPIRVLTNQTMYLGGSPDFHGFRNMSGNVHFEGKSDTLPICLSFSFSTPTGCFQVDKQVFLSDTPTVDNNKPGGKGDKRRMWELWLTTLGNSGANTKLVPIKKKLPPKYPHCQIAFKKDAFWEGDESAPPRWLPCAFPDQGVSFSPKGALGLLWDFSLPSPSVDQSDQIKSKKNLFGNYTPPVNKEVHRWYEAGWVEPTWFWENSPKDPNDRDFTALVPHTELFRLVAASRHLILKRPGFQEHEMIPTSACVTYPYAILLGLPQLIDIEKRGSTFHISCSSCRLTNCLDSSAYDYAAIIVKRPPYVLLPVDIGDEPWFDDSAIQTFRYATDLIRAKRFVAAIILGISALIAIITSFAVATTALVKEMQTATFVNNLHRNVTLALSEQRIIDLKLEARLNALEEVVLELGQDVANLKTRMSTRCHANYDFICVTPLPYNATENWERTRAHLLGIWNDNEISYNIQELTNLISDMSKQHIDAVDLSGLAQSFANGVKALNPLDWTQYFIFIGVGALLLVIVLMIFPIVFQCLAKSLDQVQSDLNVLLLKKKKGGNAAPAAEMVELPRVSYT

SEQ ID NO: 6 - protein, 488 aa, Human T-lymphotropic virus 1
MGKFLATLILFFQFCPLIFGDYSPSCCTLTIGVSSYHSKPCNPAQPVCSWTLDLLALSADQALQPPCPNLVSYSSYHATYSLYLFPHWTKKPNRNGGGYYSASYSDPCSLKCPYLGCQSWTCPYTGAVSSPYWKFQHDVNFTQEVSRLNINLHFSKCGFPFSLLVDAPGYDPIWFLNTEPSQLPPTAPPLLPHSNLDHILEPSIPWKSKLLTLVQLTLQSTNYTCIVCIDRASLSTWHVLYSPNVSVPSSSSTPLLYPSLALPAPHLTLPFNWTHCFDPQIQAIVSSPCHNSLILPPFSLSPVPTLGSRSRRAVPVAVWLVSALAMGAGVAGGITGSMSLASGKSLLHEVDKDISQLTQAIVKNHKNLLKIAQYAAQNRRGLDLLFWEQGGLCKALQEQCRFPNITNSHVPILQERPPLENRVLTGWGLNWDLGLSQWAREALQTGITLVALLLLVILAGPCILRQLRHLPSRVRYPHYSLIKPESSL

SEQ ID NO: 7 - protein, 565 aa, RD114 Endogenous Feline Retrovirus
MKLPTGMVILCSLIIVRAGFDDPRKAIALVQKQHGKPCECSGGQVSEAPPNSIQQVTCPGKTAYLMTNQKWKCRVTPKNLTPSGGELQNCPCNTFQDSMHSSCYTEYRQCRANNKTYYTATLLKIRSGSLNEVQILQNPNQLLQSPCRGSINQPVCWSATAPIHISDGGGPLDTKRVWTVQKRLEQIHKAMHPELQYHPLALPKVRDDLSLDARTFDILNTTFRLLQMSNFSLAQDCWLCLKLGTPTPLAIPTPSLTYSLADSLANASCQIIPPLLVQPMQFSNSSCLSSPFINDTEQIDLGAVTFTNCTSVANVSSPLCALNGSVFLCGNNMAYTYLPQNWTGLCVQASLLPDIDIIPGDEPVPIPAIDHYIHRPKRAVQFIPLLAGLGITAAFTTGATGLGVSVTQYTKLSHQLISDVQVLSGTIQDLQDQVDSLAEVVLQNRRGLDLLTAEQGGICLALQEKCCFYANKSGIVRNKIRTLQEELQKRRESLASNPLWTGLQGFLPYLLPLLGPLLTLLLILTIGPCVFSRLMAFINDRLNVVHAMVLAQQYQALKAEEEAQD

SEQ ID NO: 8 - protein, 685 aa, Gibbon ape leukemia virus
MVLLPGSMLLTSSLHHLRHQMSPGSWKRLIILLSCVFGGGGTSLQNKNPHQPMTLTWQVLSQTGDVVWDTKAVQPPWTWWPTLKPDICALAAGLESWDIPGTDVSSSKRVRPPDSDYTAAYKQITWGAIGCSYPRARTRMASSTFYVCPRDGRTPSEARRCGGLESLYCKEWNCETTGTGYWLPKSSKDLITGRWDQNSKWDQKFQKCHQTGWCNPLKIDFTDTGKSSRDWIVGKTWGLRFYVHGHPGVQFTIRLKITSMTAVAVGPDPVLVEQGPPRRALALPPPLPPREAPPPPLPDSNSTTLATSAQTPTVGKTIVTLNTPPPTTGDRLFNLVQGAFLTLNATNPGATKSCWLCLAMGPPYYEAITSLGEVAYSTSQDRCHWGTQGKLTLTEVSGHGLCIGKVPFTHQHLCNQTLSINSSEGHQYLLPSNHSWWACSTGLTPCLSTSVFNQSRDFCIQVQLIPRIYYYPEEVLLQAYDDSHPRPKREAVSLTLAVLLGLGITAGIGTGSTALIKGPIDLQQGLTSLQIAIDADLRALQDSVSKLEDSLTSLSEVVLQNRRGLDLLFLKEGGLCAALKEECCFYIDHSGAVRDSMKKLKEKLDKRQLERQKNQNWYEGWFNNSPWFTTLLSTIAGPLLLLLLLLILGPCIINKLVQFINDRVSAVKILVLRTKYQALDNEDNL

SEQ ID NO: 9 - protein, 665 aa, Moloney Murine leukemia virus
MARSTLSKPLKNKVNPRGPLIPLILLMLRGVSTASPGSSPHQVYNITWEVTNGDRETVWATSGNHPLWTWWPDLTPDLCMLAHHGPSYWGLEYQSPFSSPPGPPCCSGGSSPGCSRDCEEPLTSLTPRCNTAWNRLKLDQTTHKSNEGFYVCPGPHRPRESKSCGGPDSFYCAYWGCETTGRAYWKPSSSWDFITVNNNLTSDQAVQVCKDNKWCNPLVIRFTDAGRRVTSWTTGHYWGLRLYVSGQDPGLTFGIRLRYQNLGPRVPIGPNPVLADQQPLSKPKPVKSPSVTKPPSGTPLSPTQLPPAGTENRLLNLVDGAYQALNLTSPDKTQECWLCLVAGPPYYEGVAVLGTYSNHTSAPANCSVASQHKLTLSEVTGQGLCIGAVPKTHQALCNTTQTSSRGSYYLVAPTGTMWACSTGLTPCISTTILNLTTDYCVLVELWPRVTYHSPSYVYGLFERSNRHKREPVSLTLALLLGGLTMGGIAAGIGTGTTALMATQQFQQLQAAVQDDLREVEKSISNLEKSLTSLSEVVLQNRRGLDLLFLKEGGLCAALKEECCFYADHTGLVRDSMAKLRERLNQRQKLFESTQGWFEGLFNRSPWFTTLISTIMGPLIVLLMILLFGPCILNRLVQFVKDRISVVQALVLTQQYHQLKPIEYEP

SEQ ID NO: 10 - protein, 563 aa, Baboon Endogenous Virus
MGFTTKIIFLYNLVLVYAGFDDPRKAIELVQKRYGRPCDCSGGQVSEPPSDRVSQVTCSGKTAYLMPDQRWKCKSIPKDTSPSGPLQECPCNSYQSSVHSSCYTSYQQCRSGNKTYYTATLLKTQTGGTSDVQVLGSTNKLIQSPCNGIKGQSICWSTTAPIHVSDGGGPLDTTRIKSVQRKLEEIHKALYPELQYHPLAIPKVRDNLMVDAQTLNILNATYNLLLMSNTSLVDDCWLCLKLGPPTPLAIPNFLLSYVTRSSDNISCLIIPPLLVQPMQFSNSSCLFSPSYNSTEEIDLGHVAFSNCTSITNVTGPICAVNGSVFLCGNNMAYTYLPTNWTGLCVLATLLPDIDIIPGDEPVPIPAIDHFIYRPKRAIQFIPLLAGLGITAAFTTGATGLGVSVTQYTKLSNQLISDVQILSSTIQDLQDQVDSLAEVVLQNRRGLDLLTAEQGGICLALQEKCCFYVNKSGIVRDKIKTLQEELERRRKDLASNPLWTGLQGLLPYLLPFLGPLLTLLLLLTIGPCIFNRLTAFINDKLNIIHAMVLTQQYQVLRTDEEAQD

SEQ ID NO: 11 - protein, 985 aa, Human Foamy Virus
MTLQQWIIWKKMNKAHEALQNTTTVTEQQKEQIILDIQNEEVQPTRRDKFRYLLYTCCATSSRVLAWMFLVCILLIIVLVSCFVTISRIQWNKDIQVLGPVIDWNVTQRAVYQPLQTRRIARSLRMQHPVPKYVEVNMTSIPQGVYYEPHPEPIVVKERVLGLSQILMINSENIANNANLTQEVKKLLTEMVNEEMQSLSDVMIDFEIPLGDPRDQEQYIHRKCYQEFANCYLVKYKEPKPWPKEGLIADQCPLPGYHAGLTYNRQSIWDYYIKVESIRPANWTTKSKYGQARLGSFYIPSSLRQINVSHVLFCSDQLYSKWYNIENTIEQNERFLLNKLNNLTSGTSVLKKRALPKDWSSQGKNALFREINVLDICSKPESVILLNTSYYSFSLWEGDCNFTKDMISQLVPECDGFYNNSKWMHMHPYACRFWRSKKNEKEETKCRDGETKRCLYYPLWDSPESTYDFGYLAYQKNFPSPICIEQQKIRDQDYEVYSLYQERKIASKAYGIDTVLFSLKNFLNYTGTPVNEMPNARAFVGLIDPKFPPSYPNVTREHYTSCNNRKRRSVDNNYAKLRSMGYALTGAVQTLSQISDINDENLQQGIYLLRDHVITLMEATLHDISVMEGMFAVQHLHTHLNHLKTMLLERRIDWTYMSSTWLQQQLQKSDDEMKVIKRIARSLVYYVKQTHSSPTATAWEIGLYYELVIPKHIYLNNWNVVNIGHLVKSAGQLTHVTIAHPYEIINKECVETIYLHLEDCTRQDYVICDVVKIVQPCGNSSDTSDCPVWAEAVKEPFVQVNPLKNGSYLVLASSTDCQIPPYVPSIVTVNETTSCFGLDFKRPLVAEERLSFEPRLPNLQLRLPHLVGIIAKIKGIKIEVTSSGESIKEQIERAKAELLRLDIHEGDTPAWIQQLAAATKDVWPAAASALQGIGNFLSGTAQGIFGTAFSLLGYLKPILIGVGVILLVILIFKIVSWIPTKKKNQ

SEQ ID NO: 12 - protein, 913 aa, Psuedorabies virus
MPAGGGLWRGPRGHRPGHHGGAGLGRLWPAPHHAAAARGAVALALLLLALAAAPPCGAAAVTRAASASPTPGTGATPNDVSAEASLEEIEAFSPGPSEAPDGEYGDLDARTAVRAAATERDRFYVCPPPSGSTVVRLEPEQACPEYSQGRNFTEGIAVLFKENIAPHKFKAHIYYKNVIVTTVWSGSTYAAITNRFTDRVPVPVQEITDVIDRRGKCVSKAEYVRNNHKVTAFDRDENPVEVDLRPSRLNALGTRGWHTTNDTYTKIGAAGFYHTGTSVNCIVEEVEARSVYPYDSFALSTGDIVYMSPFYGLREGAHGEHIGYAPGRFQQVEHYYPIDLDSRLRASESVTRNFLRTPHFTVAWDWAPKTRRVCSLAKWREAEEMTRDETRDGSFRFTSRALGASFVSDVTQLDLQRVHLGDCVLREASEAIDAIYRRRYNSTHVLAGDRPEVYLARGGFVVAFRPLISNELAQLYARELERLGLAGVVGPAAPAAARRARRSPGPAGTPEPPAVNGTGHLRITTGSAEFARLQFTYDHIQAHVNDMLGRIAAAWCELQNKDRTLWSEMSRLNPSAVATAALGQRVSARMLGDVMAISRCVEVRGGVYVQNSMRVPGERGTCYSRPLVTFEHNGTGVIEGQLGDDNELLISRDLIEPCTGNHRRYFKLGSGYVYYEDYNYVRMVEVPETISTRVTLNLTLLEDREFLPLEVYTREELADTGLLDYSEIQRRNQLHALKFYDIDRVVKVDHNVVLLRGIANFFQGLGDVGAAVGKVVLGATGAVISAVGGMVSFLSNPFGALAIGLLVLAGLVAAFLAYRHISRLRRNPMKALYPVTTKTLKEDGVDEGDVDEAKLDQARDMIRYMSIVSALEQQEHKARKKNSGPALLASRVGAMATRRRHYQRLESEDPDAL

SEQ ID NO: 13 - protein, 400 aa, Psuedorabies virus
MLLAALLAALVARTTLGADVDAVPAPTFPPPAYPYTESWQLTLTTVPSPFVGPADVYHTRPLEDPCGVVALISDPQVDRLLNEAVAHRRPTYRAHVAWYRIADGCAHLLYFIEYADCDPRQIFGRCRRRTTPMWWTPSADYMFPTEDELGLLMVAPGRFNEGQYRRLVSVDGVNILTDFMVALPEGQECPFARVDQHRTYKFGACWNDESFRRGVDVMRFLTPFYQQPPHREVVNYWYRKNGRTLPRAYAAATPYAIDPARPSAGSPRPRPRPRPRPKPEPAPVTPAPPGRLPEPATRDHAAGGHPTPRPPRPETPHRPFAPPAVVPSGWPQPAEPFQPRTPAAPGVSRHRSVIVGTGTAMGALLVGVCVYIFFRLRGAKGYRLLGGPADTDELKAQPGP

SEQ ID NO: 14 - protein, 686 aa, Psuedorabies virus
MPASSVRLPLRLLTLAGLLALAGAAALARGAPQGGPPSPQGGPAPTAAPARGPTLFVLVGDGSAWFVFQLGGLGALNDTRIRGHLLGRYLVSYQVVPPPVSAWYFVQRPRERPRLSGPPSGAELVAFDAPGVRRTYTTAAVWPAEVAVLADAEARCPAAVFNVTLGEAFLGLRVALRSFLPLEVIISAERMRMIAPPALGSDLEPPGPPAGRFHVYTLGFLSDGAMHQTMRDVAAYVHESDDYLAQLSAAHAAALAAVVQPGPYYFYRAAVRLGVAAFVFSEAARRDRRASAPALLRVESDARLLSRLLMRAAGCPAGFAGLFDGRAERVPVAPADQLRAAWTFGEDPAPRLDLARATVAEAYRRSVRGKPFDQQALFFAVALLLRAGGPGDARETLLRTTAMCTAERAAAAAELTRAALSPTAAWNEPFSLLDVLSPCAVSLRRDLGGDATLANLGAAARLALAPAGAPGAAAATDEGAEEEEEDPVARAAPEIPAEALLALPLRGGASFVFTRRRPDCGPAYTLGGVDIANPLVLAIVSNDSAACDYTDRMPESQHLPATDNPSVCVYCDCVFVRYSSAGTILETVLIESKDMEEQLMAGANSTIPSFNPTLHGGDVKALMLFPNGTVVDLLSFTSTRLAPVSPAYVVASVVGAAITVGILYALFKMLCSFSSEGYSRLINARS

SEQ ID NO: 15 - protein, 156 aa, Psuedorabies virus
MSPLVAVLVFFSAALGIPGPGVAGNPRGLDAIFEAPVTPAPPTRHPRREELEWDDEDHPLLDLEPPVGSRCHPYIAYSLPPDMNAVTSVVVKPYCSPPEVILWASGTAYLVNPFVAIQALAVGEPLNEAALKELGEVAVHKDSLPPLRYNGGPPAE

SEQ ID NO: 16 - protein, 904 aa, Herpes simplex virus 1 (HHV1)
MRQGAPARGRRWFVVWALLGLTLGVLVASAAPSSPGTPGVAAATQAANGGPATPAPPAPGAPPTGDPKPKKNKKPKPPKPPRPAGDNATVAAGHATLREHLRDIKAENTDANFYVCPPPTGATVVQFEQPRRCPTRPEGQNYTEGIAVVFKENIAPYKFKATMYYKDVTVSQVWFGHRYSQFMGIFEDRAPVPFEEVIDKINAKGVCRSTAKYVRNNLETTAFHRDDHETDMELKPANAATRTSRGWHTTDLKYNPSRVEAFHRYGTTVNCIVEEVDARSVYPYDEFVLATGDFVYMSPFYGYREGSHTEHTSYAADRFKQVDGFYARDLTTKARATAPTTRNLLTTPKFTVAWDWVPKRPSVCTMTKWQEVDEMLRSEYGGSFRFSSDAISTTFTTNLTEYPLSRVDLGDCIGKDARDAMDRIFARRYNATHIKVGQPQYYLANGGFLIAYQPLLSNTLAELYVREHLREQSRKPPNPTPPPPGASANASVERIKTTSSIEFARLQFTYNHIQRHVNDMLGRVAIAWCELQNHELTLWNEARKLNPNAIASATVGRRVSARMLGDVMAVSTCVPVAADNVIVQNSMRISSRPGACYSRPLVSFRYEDQGPLVEGQLGENNELRLTRDAIEPCTVGHRRYFTFGGGYVYFEEYAYSHQLSRADITTVSTFIDLNITMLEDHEFVPLEVYTRHEIKDSGLLDYTEVQRRNQLHDLRFADIDTVIHADANAAMFAGLGAFFEGMGDLGRAVGKVVMGIVGGVVSAVSGVSSFMSNPFGALAVGLLVLAGLAAAFFAFRYVMRLQSNPMKALYPLTTKELKNPTNPDASGEGEEGGDFDEAKLAEAREMIRYMALVSAMERTEHKAKKKGTSALLSAKVTDMVMRKRRNTNYTQVPNKDGDADEDDL

SEQ ID NO: 17 - protein, 394 aa, Herpes simplex virus 1 (HHV1)
MGGAAARLGAVILFVVIVGLHGVRSKYALVDASLKMADPNRFRGKDLPVLDQLTDPPGVRRVYHIQAGLPDPFQPPSLPITVYYAVLERACRSVLLNAPSEAPQIVRGASEDVRKQPYNLTIAWFRMGGNCAIPITVMEYTECSYNKSLGACPIRTQPRWNYYDSFSAVSEDNLGFLMHAPAFETAGTYLRLVKINDWTEITQFILEHRAKGSCKYALPLRIPPSACLSPQAYQQGVTVDSIGMLPRFIPENQRTVAVYSLKIAGWHGPKAPYTSTLLPPELSETPNATQPELAPEDPEDSALLEDPVGTVAPQIPPNWHIPSIQDAATPYHPPATPNNMGLIAGAVGGSLLAALVICGIVYWMRRHTQKAPKRIRLPHIREDDQPSSHQPLFY

SEQ ID NO: 18 - protein, 838 aa, Herpes simplex virus 1 (HHV1)
MGNGLWFVGVIILGVAWGQVHDWTEQTDPWFLDGLGMDRMYWRDTNTGRLWLPNTPDPQKPPRGFLAPPDELNLTTASLPLLRWYEERFCFVLVTTAEFPRDPGQLLYIPKTYLLGRPPNASLPAPTTVEPTAQPPPSVAPLKGLLHNPVASVLLRSRAWVTFSAVPDPEALTFPRGDNVATASHPSGPRDTPPPRPPVGARRHPTTELDITHLHNASTTWLATRGLLRSPGRYVYFSPSASTWPVGIWTTGELVLGCDAALVRARYGREFMGLVISMHDSPPVEVMVVPAGQTLDRVGDPADENPPGALPGPPGGPRYRVFVLGSLTRADNGSALDALRRVGGYPEEGTNYAQFLSRAYAEFFSGDAGAEQGPRPPLFWRLTGLLATSGFAFVNAAHANGAVCLSDLLGFLAHSRALAGLAARGAAGCAADSVFFNVSVLDPTARLQLEARLQHLVAEILEREQSLALHALGYQLAFVLDSPSAYDAVAPSAAHLIDALYAEFLGGRVLTTPVVHRALFYASAVLRQPFLAGVPSAVQRERARRSLLIASALCTSDVAAATNADLRTALARADHQKTLFWLPDHFSPCAASLRFDLDESVFILDALAQATRSETPVEVLAQQTHGLASTLTRWAHYNALIRAFVPEASHRCGGQSANVEPRILVPITHNASYVVTHSPLPRGIGYKLTGVDVRRPLFLTYLTATCEGSTRDIESKRLVRTQNQRDLGLVGAVFMRYTPAGEVMSVLLVDTDNTQQQIAAGPTEGAPSVFSSDVPSTALLLFPNGTVIHLLAFDTQPVAAIAPGFLAASALGVVMITAALAGILKVLRTSVPFFWRRE

SEQ ID NO: 19 - protein, 224 aa, Herpes simplex virus 1 (HHV1)
MGILGWVGLIAVGVLCVRGGLPSTEYVIRSRVAREVGDILKVPCVPLPSDDLDWRYETPSAINYALIDGIFLRYHCPGLDTVLWDRHAQKAYWVNPFLFVAGFLEDLSYPAFPANTQETETRLALYKEIRQALDSRKQAASHTPVKAGCVNFDYSRTRRCVGRQDLGPTNGTSGRTPVLPPDDEAGLQPKPLTTPPPIIATSDPTPRRDAATKSRRRRPHSRRL

SEQ ID NO: 20 - protein, 581 aa, Hepatitis C Virus
MGCSFSIFLLALLSCLTVPASAVEVRNVSSSYYATNDCSNSSITWQLNNAVLHLPGCVPCENDNGTLHCWIQVTPNVAVKHRGALTHNLRTHVDMIVMAATVCSALYVGDMCGAVMIVSQALIISPERHNFTQECNCSIYQGHITGHRMAWDMMLNWSPTLTMILAYAARVPELVLEVVFGGHWGVVFGLAYFSMQGAWAKVIAILLLVAGVDAETHTTGSAAGHAARGFANLLSPGSKQKISLINTNGSWHINRTALNCNDSLQTGFLASLFYVNNFNSSGCPERMSSCRGLDDFRIGWGTLEYETNVTNEEDMRPYCWHYPPKPCGIISARTVCGPVYCFTPSPVVVGTTDEQGLPTYSWGENETDVFLLNSTRPPQGAWFGCTWMNGTGFTKTCGAPPCRIRRDFNSTLDLLCPTDCFRKHPDTTYLKCGAGPWLTPRCLVDYPYRLWHYPCTVNFTIFKVRMYVGGVEHRLSAACNFTRGDRCRLEDRDRGQQSPLLHSTTEWAVLPCSFSDLPALSTGLLHLHQNIVDVQYLYGLTPAITKYIVKWEWVVLLFLLLADARVCACLWMLIILGQAEA

SEQ ID NO: 21 - protein, 524 aa, Rabies Virus
MVPQALLFVPLLVFPLCFGKFPIYTIPDKLGPWSPIDIHHLSCPNNLVVEDEGCTNLSGFSYMELKVGYILAIKVNGFTCTGVVTEAETYTNFVGYVTTTFKRKHFRPTPDACRAAYNWKMAGDPRYEESLHNPYPDYRWLRTVKTTKESLVIISPSVADLDPYDRSLHSRVFPSGKCSGVAVSSTYCSTNHDYTIWMPENPRLGMSCDIFTNSRGKRASKGSETCGFVDERGLYKSLKGACKLKLCGVLGLRLMDGTWVSMQTSNETKWCPPDKLVNLHDFRSDEIEHLVVEELVRKREECLDALESIMTTKSVSFRRLSHLRKLVPGFGKAYTIFNKTLMEADAHYKSVRTWNEILPSKGCLRVGGRCHPHVNGVFFNGIILGPDGNVLIPEMQSSLLQQHMELLESSVIPLVHPLADPSTVFKDGDEAEDFVEVHLPDVHNQVSGVDLGLPNWGKYVLLSAGALTALMLIIFLMTCCRRVNRSEPTQHNLRGTGREVSVTPQSGKIISSWESHKSGGETRL

SEQ ID NO: 22 - protein, 522 aa, Mokola Virus
MNIPCFVVILSLATTHSLGEFPLYTIPEKIEKWTPIDMIHLSCPNNLLSEEEGCNAESSFTYFELKSGYLAHQKVPGFTCTGVVNEAETYTNFVGYVTTTFKRKHFRPTVAACRDAYNWKVSGDPRYEESLHTPYPDSSWLRTVTTTKESLLIISPSIVEMDIYGRTLHSPMFPSGVCSNVYPSVPSCETNHDYTLWLPEDPSLSLVCDIFTSSNGKKAMNGSRICGFKDERGFYRSLKGACKLTLCGRPGIRLFDGTWVSFTKPDVHVWCTPNQLINIHNDRLDEIEHLIVEDIIKKREECLDTLETILMSQSVSFRRLSHFRKLVPGYGKAYTILNGSLMETNVYYKRVDKWADILPSKGCLKVGQQCMEPVKGVLFNGIIKGPDGQILIPEMQSEQLKQHMDLLKAAVFPLRHPLISREAVFKKDGDADDFVDLHMPDVHKSVSDVDLGLPHWGFWMLIGATIVAFVVLVCLLRVCCKRVRRRRSGRATQEIPLSFPSAPVPRAKVVSSWESYKGLPGT

SEQ ID NO: 23 - protein, 550 aa, Measles Virus
MGLKASVSAIFMTVLLTLQTPTGQIHWGNLSKIGVVGIGSASYKVMTRSSHQSLVIKLMPNITLLNNCTRVEIAEYRRLLRTVLEPIRDALNAMTQNIRPVQSVASSRRHKRFAGVVLAGAALGVATAAQITAGIALHQSMLNSQAIDNLRASLETTNQAIETIRQAGQEMILAVQGIQDYINNELIPSMNQLSCDLIGQKLGLKLLRYYTEILSLFGPSLRDPISAEISIQALSYALGGDINKVLEKLGYSGGDLLGILESRGIKARITHVDTESYFIVLSIAYPTLSEIKGVIVHRLEGVSYNIGSQEWYTTVPKYVATQGYLISNFDESSCTFMPEGTVCSQNALYPMSPLLQECLRGSTKSCARTLVSGSFGNRFILSQGNLIANCASILCKCYTTGTIINQDPDKILTYIAADYCPVVEVNGVTIQVGSRKYPDAVYLHRIDLGPPISLERLDVGTNLGNAVAKLEDAKELLESSDQILRSMKGLSSTNIVYILIAVCLGGLIGIPTLICCCRGRCNKKGGQVGMSRPGLKPDLTGTSKSYVRSL

SEQ ID NO: 24 - protein, 617 aa, Measles Virus
MSPQRDRINAFYKDNPHPKGSRIVINREHLMIDRPYVLLAVLFVMFLSLIGLLAIAGIRLHRAAIYTAEIHKSLSTNLDVTNSIEHQVKDVLTPLFKIIGDEVGLRTPQRFTDLVKFISDKIKFLNPDREYDFRDLTWCINPPERIKLDYDQYCADVAAEELMNALVNSTLLETRTTNQFLAVSKGNCSGPTTIRGQFSNMSLSLLDLYLSRGYNVSSIVTMTSQGMYGGTYLVEKPNLSSKGSELPQPSMHRVFEVGVIRNPGLGAPVFHMTNYFEQPVSNDFSNCMVALGELKLAALCHGEDSITIPYQGSGKGVSFQLVKLGVWKSPTDMQSWVPLSTDDPVIDRLYLSSHRGIIADNQAKWAVPTTRTDDKLRMETCFQQACKGKIQALCENPEWAPLKDNRIPSYGVLSVDLSLAVELKIKIASGFGPLITHGSGMDLYKSNHNNVYWLTIPPMKNLALGVINTLEWIPRFKVSPNLFTVPIKEAGEDCHAPTYLPAEVDGDVKLSSNLVILPGQDLQYVLATYDTSRVEHAVVYYVYSPSRSFSYFYPFRLPIKGVPIELQVECFTWDQKLWCRHFCVLADSESGGHITHSGMVGMGVSCTVTREDGTNRG

SEQ ID NO: 25 - protein, 676 aa, Ebola Zaire Virus
MGVTGILQLPRDRFKRTSFFLWVIILFQRTFSIPLGVIHNSTLQVSDVDKLVCRDKLSSTNQLRSVGLNLEGNGVATDVPSATKRWGFRSGVPPKVVNYEAGEWAENCYNLEIKKPDGSECLPAAPDGIRGFPRCRYVHKVSGTGPCAGDFAFHKEGAFFLYDRLASTVIYRGTTFAEGVVAFLILPQAKKDFFSSHPLREPVNATEDPSSGYYSTTIRYQATGFGTNETEYLFEVDNLTYVQLESRFTPQFLLQLNETIYTSGKRSNTTGKLIWKVNPEIDTTIGEWAFWETKKNLTRKIRSEELSFTVVSNGAKNISGQSPARTSSDPGTNTTTEDHKIMASENSSAMVQVHSQGREAAVSHLTTLATISTSPQSLTTKPGPDNSTHNTPVYKLDISEATQVEQHHRRTDNDSTASDTPSATTAAGPPKAENTNTSKSTDFLDPATTTSPQNHSETAGNNNTHHQDTGEESASSGKLGLITNTIAGVAGLITGGRRTRREAIVNAQPKCNPNLHYWTTQDEGAAIGLAWIPYFGPAAEGIYIEGLMHNQDGLICGLRQLANETTQALQLFLRATTELRTFSILNRKAIDFLLQRWGGTCHILGPDCCIEPHDWTKNITDKIDQIIHDFVDKTLPDQGDNDNWWTGWRQWIPAGIGVTGVIIAVIALFCICKFVF

SEQ ID NO: 26 - protein, 495 aa, Dengue virus
MRCVGIGNRDFVEGLSGATWVDVVLEHGSCVTTMAKDKPTLDIELLKTEVTNPAVLRKLCIEAKISNTTTDSRCPTQGEATLVEEQDTNFVCRRTFVDRGWGNGCGLFGKGSLITCAKFKCVTKLEGKIVQYENLKYSVIVTVHTGDQHQVGNETTEHGTIATITPQAPTSEIQLTDYGALTLDCSPRTGLDFNEMVLLTMKEKSWLVHKQWFLDLPLPWTSGASTSQETWNRQDLLVTFKTAHAKKQEVVVLGSQEGAMHTALTGATEIQTSGTTTIFAGHLKCRLKMDKLTLKGISYVMCTGSFKLEKEVAETQHGTVLVQVKYEGTDAPCKIPFSSQDEKGVTQNGRLVTANPIVTDKEKPVNIEAEPPFGESYIVVGAGEKALKLSWFKKGSSIGKMFEATARGARRMAILGDTAWDFGSIGGVFTSVGKLVHQIFGTAYGVLFSGVSWTMKIGIGILLTWLGLNSRSTSLSMTCIAVGMVTLYLGVMVQA

SEQ ID NO: 27 - protein, 505 aa, Zika virus
MIRCIGVSNRDFVEGMSGGTWVDVVLEHGGCVTVMAQDKPTVDIELVTTTVSNMAEVRSYCYEASISDMASDSRCPTQGEAYLDKQSDTQYVCKRTLVDRGWGNGCGLFGKGSLVTCAKFACSKKMTGKSIQPENLEYRIMLSVHGSQHSGMIVNDTGHETDENRAKVEITPNSPRAEATLGGFGSLGLDCEPRTGLDFSDLYYLTMNNKHWLVHKEWFHDIPLPWHAGADTGTPHWNNKEALVEFKDAHAKRQTVVVLGSQEGAVHTALAGALEAEMDGAKGRLSSGHLKCRLKMDKLRLKGVSYSLCTAAFTFTKIPAETLHGTVTVEVQYAGTDGPCKVPAQMAVDMQTLTPVGRLITANPVITESTENSKMMLELDPPFGDSYIVIGVGEKKITHHWHRSGSTIGKAFEATVRGAKRMAVLGDTAWDFGSVGGALNSLGKGIHQIFGAAFKSLFGGMSWFSQILIGTLLMWLGLNTKNGSISLMCLALGGVLIFLSTAVSA

SEQ ID NO: 28 - protein, 427 aa, West Nile Virus
MFNCLGMSNRDFLEGVSGATWVDLVLEGDSCVTIMSKDKPTIDVKMMNMEAANLAEVRSYCYLATVSDLSTKAACPTMGEAHNDKRADPAFVCRQGVVDRGWGNGCGLFGKGSIDTCAKFACSTKAIGRTILKENIKYEVAIFVHGPTTVESHGNYSTQVGATQAGRFSITPAAPSYTLKLGEYGEVTVDCEPRSGIDTNAYYVMTVGTKTFLVHREWFMDLNLPWSSAGSTVWRNRETLMEFEEPHATKQSVIALGSQEGALHQALAGAIPVEFSSNTVKLTSGHLKCRVKMEKLQLKGTTYGVCSKAFKFLGTPADTGHGTVVLELQYTGTDGPCKVPISSVASLNDLTPVGRLVTVNPFVSVATANAKVLIELEPPFGDSYIVVGRGEQQINHHWHKSGSSIGKAFTTTLKGAQRLAALGDTAW

SEQ ID NO: 29 - protein, 501 aa, Japanese Encephalitis Virus
MFNCLGMGNRDFIEGASGATWVDLVLEGDSCLTIMANDKPTLDVRMINIEASQLAEVRSYCYHASVTDISTVARCPTTGEAHNEKRADSSYVCKQGFTDRGWGNGCGLFGKGSIDTCAKFSCTSKAIGRTIQPENIKYEVGIFVHGTTTSENHGNYSAQVGASQAAKFTVTPNAPSITLKLGDYGEVTLDCEPRSGLNTEAFYVMTVGSKSFLVHREWFHDLALPWTSPSSTAWRNRELLMEFEEAHATKQSVVALGSQEGGLHQALAGAIVVEYSSSVKLTSGHLKCRLKMDKLALKGTTYGMCTGKFSFAKNPADTGHGTVVIELSYSGRDGPCKIPIVSVASLNDMTPVGRLVTVNPFVATSSANSKVLVEMEPPFGDSYIVVGRGDKQINHHWHKAGSTLGKAFSTTLKGAQRLAALGDTAWDFGSIGGVFNSIGKAVHQVFGGAFRTLFGGMSWITQGLMGALLLWMGVNARDRSIALAFLATGGVLVFLATNVHA

SEQ ID NO: 30 - protein, 717 aa, Hepatitis G Virus
MSLLTNRFIRRVDKDQWGPGVMGKDPKPCPSRWAGKCMGPPSSAAACSRGSPRILRVRAGGISLFYTIMAVLLLLLVVEAGAILAPATHACRANGQYFLTNCCAPEDIGFCLEGGCLVALGCTVCTDRCWPLYQAGLAVRPGKSAAQLVGELGSLYGPLSVSAYVAGILGLGEVYSGVLTVGVALRRRVYLMPNLKCAVECDVKWGSEFWRWTEQLASNYWILEYLWKVPFEFWRGVMSLTPLLVWVAALLLLEQRIVMVFLLVTMAGMLQGAPASVLGSRPFDYGLKWQSCSCRANGSRIPTGERVWDRGNVTLLCDCPNGPWVWVPAFCQAVGWGDPITHWSHGQNQWPLSCPQYVYGSVSVTCVWGSVSWFASTGGRDSKIDVWSLVPVGSASCTIAALGSSDRDTVVELSEWGVPCVTCILDRRPASCGTCVRDCWPETGSVRFPFHRCGTGPRLTKDLEAVPFVNRTTPFTIRGPLGNQGRGNPVRSPLGFGSYTMTKIRDSLHLVKCPTPAIEPPTGTFGFFPGVPPINNCMPLGTEVSEALGGAGLTGGFYEPLVRRCSELMGRRNPVCPGYAWLSSGRPDGFIHVQGHLQEVDAGNFIPPPRWLLLDFVFVLLYLMKLAEARLVPLILLLLWWWVNQLAVLGLPAVDAAVAGEVFAGPALSWCLGLPTVSMILGLANLVLYFRWMGPQRLMFLVLWKLARGLDLNSPHQ

SEQ ID NO: 31 - protein, 539 aa, Mumps Virus
MKVFLVTCLGFAVFSSSVCVNINILQQIGYIKQQVRQLSYYSQSSSSYIVVKLLPNIQPTDNSCEFKSVTQYNKTLSNLLLPIAENINNIASPSSGSRRHKRFAGIAIGIAALGVATAAQVTAAVSLVQAQTNARAIAAMKNSIQATNRAVFEVKEGTQRLAIAVQAIQDHINTIMNTQLNNMSCQILDNQLATSLGLYLTELTTVFQPQLINPALSPISIQALRSLLGSMTPAVVQATLSTSISAAEILSAGLMEGQIVSVLLDEMQMIVKINIPTIVTQSNALVIDFYSISSFINNQESIIQLPDRILEIGNEQWSYPAKNCKLTRHHIFCQYNEAERLSLESKLCLAGNISACVFSPIAGSYMRRFVALDGTIVANCRSLTCLCKSPSYPIYQPDHHAVTTIDLTACQTLSLDGLDFSIVSLSNITYAENLTISLSQTINTQPIDISTELSKVNASLQNAVKYIKESNHQLQSVNVNSKIGAIIVAALVLSILSIIISLLFCCWAYVATKEIRRINFKTNHINTISSSVDDLIRYL

SEQ ID NO: 32 - protein, 583 aa, Mumps Virus
MEPSKLFTMSDNATFAPGPVINAADKKTFRTCFRILVLSVQAVTLILVIVTLGELVRMINDQGLSNQLSSIADKIRESATMIASAVGVMNQVIHGVTVSLPLQIEGNQNQLLSTLATICTGKKQVSNCSTNIPLVNDLRFINGINKFIIEDYATHDFSIGHPLNMPSFIPTATSPNGCTRIPSFSLGKTHWCYTHNVINANCKDHTSSNQYISMGILVQTASGYPMFKTLKIQYLSDGLNRKSCSIATVPDGCAMYCYVSTQLETDDYAGSSPPTQKLTLLFYNDTVTERTISPTGLEGNWATLVPGVGSGIYFENKLIFPAYGGVLPNSSLGVKSAREFFRPVNPYNPCSGPQQDLDQRALRSYFPSYFSNRRVQSAFLVCAWNQILVTNCELVVPSNNQTLMGAEGRVLLINNRLLYYQRSTSWWPYELLYEISFTFTNSGQSSVNMSWIPIYSFTRPGSGNCSGENVCPTACVSGVYLDPWPLTPYSHQSGINRNFYFTGALLNSSTTRVNPTLYVSALNNLKVLAPYGNQGLFASYTTTTCFQDTGDASVYCVYIMELASNIVGEFQILPVLTRLTITL

SEQ ID NO: 33 - protein, 566 aa, Sendai Virus
MTAYIQRSQCISTSLLVVLTTLVSCQIPRDRLSNIGVIVDEGKSLKIAGSHESRYIVLSLVPGVDFENGCGTAQVIQYKSLLNRLLIPLRDALDLQEALITVTNDTTQNAGAPQSRFFGAVIGTIALGVATSAQITAGIALAEAREAKRDIALIKESMTKTHKSIELLQNAVGEQILALKTLQDFVNDEIKPAISELGCETAALRLGIKLTQHYSELLTAFGSNFGTIGEKSLTLQALSSLYSANITEIMTTIKTGQSNIYDVIYTEQIKGTVIDVDLERYMVTLSVKIPILSEVPGVLIHKASSISYNIDGEEWYVTVPSHILSRASFLGGADITDCVESRLTYICPRDPAQLIPDSQQKCILGDTTRCPVTKVVDSLIPKFAFVNGGVVANCIASTCTCGTGRRPISQDRSKGVVFLTHDNCGLIGVNGVELYANRRGHDATWGVQNLTVGPAIAIRPIDISLNLADATNFLQDSKAELEKARKILSEVGRWYNSRETVITIIVVMVVILVVIIVIIIVLYRLRRSMLMGNPDDRIPRDTYTLEPKIRHMYTNGGFDAMAEKRL

SEQ ID NO: 34 - protein, 576 aa, Sendai Virus
MDGDRGKRDSYWSTSPSGSTTKPASGWERSSKADTWLLILSFTQWALSIATVIICIIISARQGYSMKEYSMTVEALNMSSREVKESLTSLIRQEVIARAVNIQSSVQTGIPVLLNKNSRDVIQMIDKSCSRQELTQHCESTIAVHHADGIAPLEPHSFWRCPVGEPYLSSDPEISLLPGPSLLSGSTTISGCVRLPSLSIGEAIYAYSSNLITQGCADIGKSYQVLQLGYISLNSDMFPDLNPVVSHTYDINDNRKSCSVVATGTRGYQLCSMPTVDERTDYSSDGIEDLVLDVLDLKGRTKSHRYRNSEVDLDHPFSALYPSVGNGIATEGSLIFLGYGGLTTPLQGDTKCRTQGCQQVSQDTCNEALKITWLGGKQVVSVIIQVNDYLSERPKIRVTTIPITQNYLGAEGRLLKLGDRVYIYTRSSGWHSQLQIGVLDVSHPLTINWTPHEALSRPGNKECNWYNKCPKECISGVYTDAYPLSPDAANVATVTLYANTSRVNPTIMYSNTTNIINMLRIKDVQLEAAYTTTSCITHFGKGYCFHIIEINQKSLNTLQPMLFKTSIPKLCKAESL

SEQ ID NO: 35 - protein, 530 aa, Autographa californica nucleopolyhedrovirus
MLLVNQSHQGFNKEHTSKMVSAIVLYVLLAAAAHSAFAAEHCNAQMKTGPYKIKNLDITPPKETLQKDVEITIVETDYNENVIIGYKGYYQAYAYNGGSLDPNTRVEETMKTLNVGKEDLLMWSIRQQCEVGEELIDRWGSDSDDCFRDNEGRGQWVKGKELVKRQNNNHFAHHTCNKSWRCGISTSKMYSRLECQDDTDECQVYILDAEGNPINVTVDTVLHRDGVSMILKQKSTFTTRQIKAACLLIKDDKNNPESVTREHCLIDNDIYDLSKNTWNCKFNRCIKRKVEHRVKKRPPTWRHNVRAKYTEGDTATKGDLMHIQEELMYENDLLKMNIELMHAHINKLNNMLHDLIVSVAKVDERLIGNLMNNSVSSTFLSDDTFLLMPCTNPPAHTSNCYNNSIYKEGRWVANTDSSQCIDFSNYKELAIDDDVEFWIPTIGNTTYHDSWKDASGWSFIAQQKSNLITTMENTKFGGVGTSLSDITSMAEGELAAKLTSFMFGHVVNFVIILIVILFLYCMIRNRNRQY

SEQ ID NO: 36 - protein, 985 aa, Ross River Virus
MSAALMMCILANTSFPCSSPPCYPCCYEKQPEQTLRMLEDNVNRPGYYELLEASMTCRNRSRHRRSVTEHFNVYKATRPYLAYCADCGDGYFCYSPVAIEKIRDEAPDGMLKIQVSAQIGLDKAGTHAHTKIRYMAGHDVQESKRDSLRVYTSAACSIHGTMGHFIVAHCPPGDYLKVSFEDADSHVKACKVQYKHDPLPVGREKFVVRPHFGVELPCTSYQLTTAPTDEEIDMHTPPDIPDRTLLSQTAGNVKITAGGRTIRYNCTCGRDNVGTTSTDKTINTCKIDQCHAAVTSHDKWQFTSPFVPRADQTARRGKVHVPFPLTNVTCRVPLARAPDVTYGKKEVTLRLHPDHPTLFSYRSLGAEPHPYEEWVDKFSERIIPVTEEGIEYQWGNNPPVRLWAQLTTEGKPHGWPHEIIQYYYGLYPAATIAAVSGASLMALLTLAATCCMLATARRKCLTPYALTPGAVVPLTLGLLCCAPRANAASFAETMAYLWDENKTLFWMEFAAPAAALALLACCIKSLICCCKPFSFLVLLSLGASAKAYEHTATIPNVVGFPYKAHIERNGFSPMTLQLEVVETSWEPTLNLEYITCEYKTVVPSPFIKCCGTSECSSKEQPDYQCKVYTGVYPFMWGGAYCFCDSENTQLSEAYVDRSDVCKHDHASAYKAHTASLKATIRISYGTINQTTEAFVNGEHAVNVGGSKFIFGPISTAWSPFDNKIVVYKDDVYNQDFPPYGSGQPGRFGDIQSRTVESKDLYANTALKLSRPSPGVVHVPYTPTPSGFKYWLKEKGSSLNTKAPFGCKIKTNPVRAMDCAVGSIPVSMDIPDSAFTRVVDAPAVTDLSCQVVVCTHSSDFGGVATLSYKTDKPGKCAVHSHSNVATLQEATVDVKEDGKVTVHFSTASASPAFKVSVCDAKTTCTAACEPPKDHIVPYGASHNNQVFPDMSGTAMTWVQRLASGLGGLALIAVVVLVLVTCITMRR

SEQ ID NO: 37 - protein, 524 aa, Artificial Sequence
  Codon optimized rabies virus
MVPQALLFVPLLVFPLCFGKFPIYTIPDKLGPWSPIDIHHLSCPNNLVVEDEGCTNLSGFSYMELKVGYILAIKVNGFTCTGVVTEAETYTNFVGYVTTTFKRKHFRPTPDACRAAYNWKMAGDPRYEESLHNPYPDYRWLRTVKTTKESLVIISPSVADLDPYDRSLHSRVFPSGKCSGVAVSSTYCSTNHDYTIWMPENPRLGMSCDIFTSSRGKRASKGSETCGFVDERGLYKSLKGACKLKLCGVLGLRLMDGTWVSMQTSNETKWCPPDKLVNLHDFRSDEIEHLVVEELVRKREECLDALESIMTTKSVSFRRLSHLRKLVPGFGKAYTIFNKTLMEADAHYKSVETWNEILPSKGCLRVGGRCHPHVNGVFFNGIILGPDGNVLIPEMQSSLLQQHMELLESSVIPLVHPLADPSTVFKDGDEAEDFVEVHLPDVHNQVSGVDLGLPNWGKYVLLSAGALTALMLIIFLMTCCRRVNRSEPTQHNLRGTGREVSVTPQSGKIISSWESHKSGGETRL

SEQ ID NO: 38 - protein, 524 aa, Rabies virus
MVPQALLLVPILGFSSCFGKFPIYTIPDTLGPWSPIDIHHLSCPNNLVVEDEGCTNLSGFSYMELKVGYISAIKVNGFTCTGVVTEAETYTNFVGYVTTTFKRKHFRPTPDACRAAYNWKMAGDPRYEESLHSPYPDYHWLRTVKTTKESLVIISPSVADLDPYDNSLHSRVFPSGKCSGITVSSVYCSTNHDYTVWMPESLRLGTSCDIFTNSRGKRASKGSKTCGFVDERGLYKSLKGACKLKLCGVLGLRLMDGTWVAMQTSNETKWCPPDQLVNLHDLRSDEIEHLVIEELVKKREECLDALESIITTKSVSFRRLSYLRKLVPGFGKAYTIFNKTLMEAEAHYKSVRTWNEIIPSKGCLRVGGRCHPHVNGVFFNGIILGPDGHVLIPEMQSSLLQQHIELLESSVIPLMHPLADPFTVFKDGDETEDFIEVHLPDVHEQVSGVDLGLPNWGEYVLLSAGTLIALMLIIFLMTCCRKVDRPESTQRSLRGTGRNVSVTSQSGKFIPSWESYKSGGETGL

SEQ ID NO: 39 - protein, 524 aa, Rabies virus
MVPQVLLFVPLLVFSMCFGKFPIYTIPDKLGPWSPIDIHHLSCPNNLVVEDEGCTNLSGFSYMELKVGYISAIKVNGFTCTGVVTEAETYTNFVGYVTTTFKRKHFRPTPDACRAAYNWKMAGDPRYEESLHNPYPDYHWLRTVKTTKESLVIISPSVADLDPYDKSLHSRVFPSGKCSGITISSTYCSTNHDYTIWMPENPRLGTSCDIFTNSRGKRASKGGKTCGFVDERGLYKSLKGACKLKLCGVLGLRLMDGTWVAMQTSDETKWCPPDQLVNLHDFRSDEIEHLVVEELVKKREECLDALESIMATKSVSFRRLSHLRKLVPGFGKAYTIFNKTLMEADAHYKSVRTWNEIIPSKGCLRVGGRCHPHVNGVFFNGIILGPDGHVLIPEMQSSLLQQHMELLESSVIPLMHPLADPSTVFKDGDEAEDFVEVHLPDVHKQISGVDLGLPSWGKYVLVSAGVLVVLMLTIFIMTCCGRVHRPKSTQHGLGGTGRKVSVTSQSGKVISSWESYKSGGETRL

SEQ ID NO: 40 - protein, 524 aa, Rabies virus
MVPQVLLFVPLLGFSLCFGKFPIYTIPDKLGPWSPIDIHHLSCPNNLVVEDEGCTNLSEFSYMELKVGYISAIKVNGFTCTGVVTEAETYTNFVGYVTTTFKRKHFRPTPDACRAAYNWKMAGDPRYEESLHNPYPDYHWLRTVRTTKESLIIISPSVTDLDPYDKSLHSRVFPGGKCSGITVSSTYCSTNHDYTIWMPENPRPRTPCDIFTNSRGKRASKGNKTCGFVDERGLYKSLKGACRLKLCGVLGLRLMDGTWVAMQTSDETKWCPPDQLVNLHDFRSDEIEHLVVEELVKKREECLDALESIMTTKSVSFRRLSHLRKLVPGFGKAYTIFNKTLMEADAHYKSVRTWNEIIPSKGCLKVGGRCHPHVNGVFFNGIILGPDGHVLIPEMQSSLLQQHMELLKSSVIPLMHPLADPSTVFKEGDEAEDFVEVHLPDVYKQISGVDLGLPNWGKYVLMTAGAMIGLVLIFSLMTWCRRANRPESKQRSFGGTGRNVSVTSQSGKVIPSWESYKSGGEIRL

SEQ ID NO: 41 - protein, 524 aa, Rabies virus
MVPQALLFVPLLVFPLCFGKFPIYTILDKLGPWSPIDIHHLSCPNNLVVEDEGCTNLSGFSYMELKVGYILAIKMNGFTCTGVVTEAETYTNFVGYVTTTFKRKHFRPTPDACRAAYNWKMAGDPRYEESLHNPYPDYRWLRTVKTTKESLVIISPSVADLDPYDRSLHSRVFPSGKCSGVAVSSTYCSTNHDYTIWMPENPRLGMSCDIFTNSRGKRASKGSETCGFVDERGLYKSLKGACKLKLCGVLGLRLMDGTWVAMQTSNETKWCPPDQLVNLHDFRSDEIEHLVVEELVRKREECLDALESIMTTKSVSFRRLSHLRKLVPGFGKAYTIFNKTLMEADAHYKSVRTWNEILPSKGCLRVGGRCHPHVNGVFFNGIILGPDGNVLIPEMQSSLLQQHMELLESSVIPLVHPLADPSTVFKDGDEAEDFVEVHLPDVHNQVSGVDLGLPNWGKYVLLSAGALTALMLIIFLMTCCRRVNRSEPTQHNLRGTGREVSVTPQSGKIISSWESHKSGGETRL

SEQ ID NO: 42 - protein, 524 aa, Rabies virus; identical to SEQ ID NO: 21

SEQ ID NO: 43 - protein, 524 aa, Rabies virus
MVPQALLFVPLLVFPLCFGKFPIYTIPDKLGPWSPIDIHHLSCPNNLVVEDEGCTNLSGFSYMELKVGYILAIKMNGFTCTGVVTEAENYTNFVGYVTTTFKRKHLRPTPDACRAAYNWKMAGDPRYEESLHNPYPDYSWLRTVKTTKESLVIISPSVADLDPYDRSLHSRVFPSGKCSGVAVSSTYCSTNHDYTIWMPENPRLGKSCDIFTNSRGKRASKGSETCGFVDERGLYKSLKGACKLKLCGVLGLRLMDGTWVAMQTSNETKWCPPDQLVNLHDFRSDEIEHLVVEELVRKREECLDALESIMTTKSVSFRRLSHLRKLVPGFGKAYTIFNKTLMEADAHYKSVRTWNEILPSKGCLRVGGRCHPHVNGVFFNGIILGPDGNVLIPEMQSSLLQQHMELLESSVIPLVHPLADPSTVFKDGDEAEDFVEVHLPDVHNQVSGVDLGLPNWGKYVLLSAGALTALMLIIFLMTCCRRVNRSEPTQHNLRGTGREVSVTPQTWKIISSWESHKSGGETRL

SEQ ID NO: 44 - protein, 524 aa, Rabies virus
MVPQALLFVPLLVFPLCFGKFPIYTIPDKLGPWSPIDIHHLSCPNNLVVEDEGCTNLSGFSYMELKVGYISAIKMNGFTCTGVVTEAETYTNFVGYVTTTFKRKHFRPTPDACRAAYNWKMAGDPRYEESLHNPYPDYHWLRTVKTTKESLVIISPSVADLDPYDRSLHSRVFPGGNCSGVAVSSTYCSTNHDYTIWMPENPRLGMSCDIFTNSRGKRASKGSETCGFVDERGLYKSLKGACKLKLCGVLGLRLMDGTWVAMQTSNETKWCPPGQLVNLHDFRSDEIEHLVVEELVKKREECLDALESIMTTKSVSFRRLSHLRKLVPGFGKAYTIFNKTLMEADAHYKSVRTWNEIIPSKGCLRVGGRCHPHVNGVFFNGIILGPDGNVLIPEMQSSLLQQHMELLVSSVIPLMHPLADPSTVFKNGDEAEDFVEVHLPDVHERISGVDLGLPNWGKYVLLSAGALTALMLIIFLMTCWRRVNRSEPTQHNLRGTGREVSVTPQSGKIISSWESYKSGGETGL

SEQ ID NO: 45 - protein, 524 aa, Rabies virus
MVPQVLLFVPLLGFSLCFGKFPIYTIPDELGPWSPIDIHHLSCPNNLVVEDEGCTNLSEFSYMELKVGYISAIKVNGFTCTGVVTEAETYTNFVGYVTTTFKRKHFRPTPDACRAAYNWKMAGDPRYEESLHNPYPDYHWLRTVRTTKESLIIISPSVTDLDPYDKSLHSRGFPGGKCSGITVSSTYCSTNHDYTIWMPENPGPRTPCDIFTNSRGKRASKGNKTCGFVDERGLYKSLKGACRLKLCGVLGLRLMDGTWVAMQTSDETKWCPPDQLVNLHDFRSDEIEHLVVEELVKKREECLDALESIMTTKSVSFRRLSHLRKLVPGFGKAYTIFNKTLMEADAHYKSVRTWNEIIPSKGCLKVGGRCHPHVNGVFFNGIILGPDGHVLIPEMQSSLLQQHMELLKSSVIPLMHPLADPSTVFKEGDEAEDFVEVHLPDVYKQISGVDLGLPNWGKYVLMTAGAMIGLVLIFSLMTWCRRANRPESKQRSFGGTGRNVSVTSQSGKVIPSWESYRSGGEIRL

SEQ ID NO: 46 - protein, 524 aa, Rabies virus
MVPQALLLVPLLGFSLCFGKFPIYTIPTKLGPWSPIDIHHLSCPNNLVVEDEGCTNLSGFSYMELKVGRISAIKVNGFTCTGVVTEAETYTNFVGYVTTTFKRKHFRPMPGCMYSRVQLEDGRSPQIEESLHNPYPDYHWLRTVRTTKESLIIISPSVTDLDPYDKSLHSRVFPGRKCSGITVSSTYCSTNHDYTVWMPEILRLGTSCDIFTNSRGKRASKGSKTCGFVDERGLYKSLKGACKLKLCGVPGLRLMDGTWVAMQTSNETKWCPPGQLVNLHDLHSDEIEHLVVEELVKKREECLDALESITTTKSVSFRRLSHLRKLVPGFGKAYTIFNKTLMEAEAHYKSVRTWNEIIPSKGCLRVGGGCHPHVNGVFFNGIILGPDGHVLIPEMQSSLLQQHIELLESSVIPLMHPLADPFTVFKDGDEIEDFVEVHLPDVHEQVSGVDLGLPNWGEYVLLSAGTLIALMLIIFLITCCKRVDRPESTQRSLRGTGRNVSVTSQSGKFIPSRESYKSGGETGL

SEQ ID NO: 47 - protein, 524 aa, Rabies virus
MVPQVLLFVLLLGFSLCFGKFPIYTIPDELGPWSPIDIHHLSCPNNLVVEDEGCTNLSEFSYMELKVGYISAIKVNGFTCTGVVTEAETYTNFVGYVTTTFKRKHFRPTPDACRAAYNWKMAGDPRYEESLHNPYPDYHWLRTVRTTKESLIIISPSVTDLDPYDKSLHSRVFPGRKCSGITVSSTYCSTNHDYTIWMPENPRPRTPCDIFTNSRGKRASNGNKTCGFVDERGLYKSLKGACRLKLCGVLGLRLMDGTWVAMQTSGETKWCPPDQLVNLHDFRSDEIEHLVVEELVKKREECLDALESIMTTKSVSFRRLSHLRKLVPGFGKAYTIFNKTLMEADAHYKSVRTWNEIIPSKGCLKVGGRCHPHVNGVFFNGLILGPDDHVLIPEMQSSLLQQHMELLESSVIPLMHPLADPSTVFKEGDEAEDFVEVHLPDVYKQISGVDLGLPNWGKYVLMTAGAMIGLVLIFSLMTWCRRANRPESKQRSFGGTGGNVSVTSQSGKVIPSWESYKSGGEIRL

SEQ ID NO: 48 - protein, 524 aa, Rabies virus
MVPQALLFVPLLVFPLCFGKFPIYTIPDKLGPWSPIDIHHLRCPNNLVVEDEGCTNLSGFSYMELKVGYISAIKVNGFTCTGVVTEAETYTNFVGYVTTTFKRKHFRPTPDACRAAYNWKMAGDPRYEESLHNPYPDYHWLRTVKTTKESLVIISPSVADLDPYDKSLHSRVFPSGNCSGITVSSTYCSTNHDYTIWMPENPRLETSCDIFTNSRGKRASKGSKTCGFVDERGLYKSLKGACKLKLCGVLGLRLMDGTWVAMQTSDETKWCPPDQLVNLHDFRSDEIEHLVVEELVKKREECLDALESIMTTKSVSLRRLSHLRKLVPGFGKAYTIFNKTLMEAEAHYKSVQTWNEIIPSKGCLRVGGRCHPHVNGVFFNGIILGPDGHVLIPEMQSSLLQQHMELLESSVIPLMHPLADPSTVFKDGDEAEDFVEVHLPDVHKQVSGVDLGLPNWGKYVLLSAGTLIALMLIIFLMTCCRRVNRPKSTERSLGETGRKVSVTSQSGKVISSWESYKSGGETRR

SEQ ID NO: 49 - protein, 524 aa, Rabies virus
MVPQVLLFAPLLVFPLCFGKFPIYTIPDKLGPWSPIDLHHLSCPNNLVVEDEGCTNLSGFSYMELKVGYISAIKVNGFTCTGVVTEAETYTNFVGYVTTTFKRKHFRPTPDACRAAYNWKMAGDPRYEESLHNPYPDYHWLRTVKTTKESLVIISPSVTDLDPYDKSLHSRVFPGGNCSGITVSSTYCSTNHDYTIWMPENLRLGTSCDIFTHSRGKRASKGDKTCGFVDERGLYKSLKGACKLKLCGVLGLRLMDGTWVAMQTSDETKWCPPGQLVNLHDFRSDEIEHLVEEELVKKREECLDALESIMTTKSVSFRRLSHLRKLVPGFGKAYTIFNKTLMEADAHYKSVQTWNEIIPSKGCLRVGERCHPHVNGVFFNGIILGSDGHVLIPEMQSSLLQQHMELLESSVIPLMHPLADPSTVFKDGDEVEDFVEVHLPDVHKQVSGVDLGLPKWGKYVLMIAGALIALMLIIFLMTCCRRVNRPESTQSNLGGTGRNVSVPSQSGKVISSWESYKSGGETRL

SEQ ID NO: 50 - protein, 524 aa, Rabies virus
MIPQALLFVPLLIPSLCLGKFPIYTIPDKLGPWSPIDIHHLSCPNNLVVEDEGCTSLSGFSYMELKVGYISAMKVNGFTCTGVVTEAETYTNFVGYVTTTFKRKHFRPMPDACRAAHDWKIAGDPRYEDSLQNPYPDYHWLRTVKTTKESLVIISPSVADLDPYDKSLHSRVFPSGKCLGITVSSTYCPTNHDYTIWMPVEARLGTSCDIFTNSRGKKASKGGRTCGFVDERGLYKSLKGACKLKLCGVPGLRLMNGTWVSIQTSDDIKWCPPDQLVNLHDFHSDEIEHLVVEELIKKREGCLDALESIMTTKSVSFRRLSHLRKLVPGFGKAYTIFNNTLMEADAHYKSVRTWNEVIPSKGCLKVGGRCHPPVNGVFFNGIILGPDGNVLIPEMQSSLLQQHMELLESSVIPLMHPLADPSTVFKDGDEAEDFVEVHLPDVHKQVSDVDLGLPSWGKYLLMSAGALATLILAIFLITCCRRANRTKSTQRGHRESGGKVSVAPQNGKIISSWELYKSESETGM

SEQ ID NO: 51 - protein, 904 aa, Herpes simplex virus 2
MRGGGLICALVVGALVAAVASAAPAAPAAPRASGGVAATVAANGGPASRPPPVPSPATTKARKRKTKKPPKRPEATPPPDANATVAAGHATLRAHLREIKVENADAQFYVCPPPTGATVVQFEQPRRCPTRPEGQNYTEGIAVVFKENIAPYKFKATMYYKDVTVSQVWFGHRYSQFMGIFEDRAPVPFEEVIDKINAKGVCRSTAKYVRNNMETTAFHRDDHETDMELKPAKVATRTSRGWHTTDLKYNPSRVEAFHRYGTTVNCIVEEVDARSVYPYDEFVLATGDFVYMSPFYGYREGSHTEHTSYAADRFKQVDGFYARDLTTKARATSPTTRNLLTTPKFTVAWDWVPKRPAVCTMTKWQEVDEMLRAEYGGSFRFSSDAISTTFTTNLTQYSLSRVDLGDCIGRDAREAIDRMFARKYNATHIKVGQPQYYLATGGFLIAYQPLLSNTLAELYVREYMREQDRKPRNATPAPLREAPSANASVERIKTTSSIEFARLQFTYNHIQRHVNDMLGRIAVAWCELQNHELTLWNEARKLNPNAIASATVGRRVSARMLGDVMAVSTCVPVAPDNVIVQNSMRVSSRPGTCYSRPLVSFRYEDQGPLIEGQLGENNELRLTRDALEPCTVGHRRYFIFGGGYVYFEEYAYSHQLSRADVTTVSTFIDLNITMLEDHEFVPLEVYTRHEIKDSGLLDYTEVQRRNQLHDLRFADIDTVIRADANAAMFAGLCAFFEGMGDLGRAVGKVVMGVVGGVVSAVSGVSSFMSNPFGALAVGLLVLAGLVAAFFAFRYVLQLQRNPMKALYPLTTKELKTSDPGGVGGEGEEGAEGGGFDEAKLAEAREMIRYMALVSAMERTEHKARKKGTSALLSSKVTNMVLRKRNKARYSPLHNEDEAGDEDEL

SEQ ID NO: 52 - protein, 393 aa, Herpes simplex virus 2
MGRLTSGVGTAALLVVAVGLRVVCAKYALADPSLKMADPNRFRGKNLPVLDQLTDPPGVKRVYHIQPSLEDPFQPPSIPITVYYAVLERACRSVLLHAPSEAPQIVRGASDEARKHTYNLTIAWYRMGDNCAIPITVMEYTECPYNKSLGVCPIRTQPRWSYYDSFSAVSEDNLGFLMHAPAFETAGTYLRLVKINDWTEITQFILEHRARASCKYALPLRIPPAACLTSKAYQQGVTVDSIGMLPRFTPENQRTVALYSLKIAGWHGPKPPYTSTLLPPELSDTTNATQPELVPEDPEDSALLEDPAGTVSSQIPPNWHIPSIQDVAPHHAPAAPANPGLIIGALAGSTLAALVIGGIAFWVRRRRSVAPKRLRLPHIRDDDAPPSHQPLFY

SEQ ID NO: 53 - protein, 838 aa, Herpes simplex virus 2
MGPGLWVVMGVLVGVAGGHDTYWTEQIDPWFLHGLGLARTYWRDTNTGRLWLPNTPDASDPQRGRLAPPGELNLTTASVPMLRWYAERFCFVLVTTAEFPRDPGQLLYIPKTYLLGRPRNASLPELPEAGPTSRPPAEVTQLKGLSHNPGASALLRSRAWVTFAAAPDREGLTFPRGDDGATERHPDGRRNAPPPGPPAGTPRHPTTNLSIAHLHNASVTWLAARGLLRTPGRYVYLSPSASTWPVGVWTTGGLAFGCDAALVRARYGKGFMGLVISMRDSPPAEIIVVPADKTLARVGNPTDENAPAVLPGPPAGPRYRVFVLGAPTPADNGSALDALRRVAGYPEESTNYAQYMSRAYAEFLGEDPGSGTDARPSLFWRLAGLLASSGFAFVNAAHAHDAIRLSDLLGFLAHSRVLAGLAARGAAGCAADSVFLNVSVLDPAARLRLEARLGHLVAAILEREQSLVAHALGYQLAFVLDSPAAYGAVAPSAARLIDALYAEFLGGRALTAPMVRRALFYATAVLRAPFLAGAPSAEQRERARRGLLITTALCTSDVAAATHADLRAALARTDHQKNLFWLPDHFSPCAASLRFDLAEGGFILDALAMATRSDIPADVMAQQTRGVASVLTRWAHYNALIRAFVPEATHQCSGPSHNAEPRILVPITHNASYVVTHTPLPRGIGYKLTGVDVRRPLFITYLTATCEGHAREIEPKRLVRTENRRDLGLVGAVFLRYTPAGEVMSVLLVDTDATQQQLAQGPVAGTPNVFSSDVPSVALLLFPNGTVIHLLAFDTLPIATIAPGFLAASALGVVMITAALAGILRVVRTCVPFLWRRE

SEQ ID NO: 54 - protein, 224 aa, Herpes simplex virus 2
MGFVCLFGLVVMGAWGAWGGSQATEYVLRSVIAKEVGDILRVPCMRTPADDVSWRYEAPSVIDYARIDGIFLRYHCPGLDTFLWDRHAQRAYLVNPFLFAAGFLEDLSHSVFPADTQETTTRRALYKEIRDALGSRKQAVSHAPVRAGCVNFDYSRTRRCVGRRDLRPANTTSTWEPPVSSDDEASSQSKPLATQPPVLALSNAPPRRVSPTRGRRRHTRLRRN

SEQ ID NO: 55 - protein, 868 aa, Varicella-zoster virus
MFVTAVVSVSPSSFYESLQVEPTQSEDITRSAHLGDGDEIREAIHKSQDAETKPTFYVCPPPTGSTIVRLEPTRTCPDYHLGKNFTEGIAVVYKENIAAYKFKATVYYKDVIVSTAWAGSSYTQITNRYADRVPIPVSEITDTIDKFGKCSSKATYVRNNHKVEAFNEDKNPQDMPLIASKYNSVGSKAWHTTNDTYMVAGTPGTYRTGTSVNCIIEEVEARSIFPYDSFGLSTGDIIYMSPFFGLRDGAYREHSNYAMDRFHQFEGYRQRDLDTRALLEPAARNFLVTPHLTVGWNWKPKRTEVCSLVKWREVEDVVRDEYAHNFRFTMKTLSTTFISETNEFNLNQIHLSQCVKEEARAIINRIYTTRYNSSHVRTGDIQTYLARGGFVVVFQPLLSNSLARLYLQELVRENTNHSPQKHPTRNTRSRRSVPVELRANRTITTTSSVEFAMLQFTYDHIQEHVNEMLARISSSWCQLQNRERALWSGLFPINPSALASTILDQRVKARILGDVISVSNCPELGSDTRIILQNSMRVSGSTTRCYSRPLISIVSLNGSGTVEGQLGTDNELIMSRDLLEPCVANHKRYFLFGHHYVYYEDYRYVREIAVHDVGMISTYVDLNLTLLKDREFMPLQVYTRDELRDTGLLDYSEIQRRNQMHSLRFYDIDKVVQYDSGTAIMQGMAQFFQGLGTAGQAVGHVVLGATGALLSTVHGFTTFLSNPFGALAVGLLVLAGLVAAFFAYRYVLKLKTSPMKALYPLTTKGLKQLPEGMDPFAEKPNATDTPIEEIGDSQNTEPSVNSGFDPDKFREAQEMIKYMTLVSAAERQESKARKKNKTSALLTSRLTGLALRNRRGYSRVRTENVTGV

SEQ ID NO: 56 - protein, 340 aa, Varicella-zoster virus
MQALGIKTEHFIIMCLLSGHAVFTLWYTARVKFEHECVYATTVINGGPVVWGSYNNSLIYVTFVNHSTFLDGLSGYDYSCRENLLSGDTMVKTAISTPLHDKIRIVLGTRNCHAYFWCVQLKMIFFAWFVYGMYLQFRRIRRMFGPFRSSCELISPTSYSLNYVTRVISNILLGYPYTKLARLLCDVSMRRDGMSKVFNADPISFLYMHKGVTLLMLLEVIAHISSGCIVLLTLGVAYTPCALLYPTYIRILAWVVVCTLAIVELISYVRPKPTKDNHLNHINTGGIRGICTTCCATVMSGLAIKCFYIVIFAIAVVIFMHYEQRVQVSLFGESENSQKH

SEQ ID NO: 57 - protein, 841 aa, Varicella-zoster virus
MFALVLAVVILPLWTTANKSYVTPTPATRSIGHMSALLREYSDRNMSLKLEAFYPTGFDEELIKSLHWGNDRKHVFLVIVKVNPTTHEGDVGLVIFPKYLLSPYHFKAEHRAPFPAGRFGFLSHPVTPDVSFFDSSFAPYLTTQHLVAFTTFPPNPLVWHLERAETAATAERPFGVSLLPARPTVPKNTILEHKAHFATWDALARHTFFSAEAIITNSTLRIHVPLFGSVWPIRYWATGSVLLTSDSGRVEVNIGVGFMSSLISLSSGPPIELIVVPHTVKLNAVTSDTTWFQLNPPGPDPGPSYRVYLLGRGLDMNFSKHATVDICAYPEESLDYRYHLSMAHTEALRMTTKADQHDINEESYYHIAARIATSIFALSEMGRTTEYFLLDEIVDVQYQLKFLNYILMRIGAGAHPNTISGTSDLIFADPSQLHDELSLLFGQVKPANVDYFISYDEARDQLKTAYALSRGQDHVNALSLARRVIMSIYKGLLVKQNLNATERQALFFASMILLNFREGLENSSRVLDGRTTLLLMTSMCTAAHATQAALNIQEGLAYLNPSKHMFTIPNVYSPCMGSLRTDLTEEIHVMNLLSAIPTRPGLNEVLHTQLDESEIFDAAFKTMMIFTTWTAKDLHILHTHVPEVFTCQDAAARNGEYVLILPAVQGHSYVITRNKPQRGLVYSLADVDVYNPISVVYLSRDTCVSEHGVIETVALPHPDNLKECLYCGSVFLRYLTTGAIMDIIIIDSKDTERQLAAMGNSTIPPFNPDMHGDDSKAVLLFPNGTVVTLLGFERRQAIRMSGQYLGASLGGAFLAVVGFGIIGWMLCGNSRLREYNKIPLT

SEQ ID NO: 58 - protein, 160 aa, Varicella-zoster virus
MASHKWLLQMIVFLKTITIAYCLHLQDDTPLFFGAKPLSDVSLIITEPCVSSVYEAWDYAAPPVSNLSEALSGIVVKTKCPVPEVILWFKDKQMAYWTNPYVTLKGLTQSVGEEHKSGDIRDALLDALSGVWVDSTPSSTNIPENGCVWGADRLFQRVCQ

SEQ ID NO: 59 - protein, 445 aa, Hepatitis B virus
MQLIITSKLGIIYILCGRLAFYIREKLHAVPHFVGHHILGNKSYSMGGWSSKPRQGMGTNLSVPNPLGFFPDHQLDPAFGANSNNPDWDFNPNKDHWPEAKQVGAGAFGPGFTPPHGGLLGWSPQAQGTLTTVPAAPPPASTNRQSGRQPTPISPPLRDSHPQAMQWNSTTFHQALLDPRVRGLYFPAGGSSSGTVNPVPTTASPISSIFSRTGDPAPNMESTTSGFLGPLLVLQAGFFLLTRILTIPQSLDSWLTSLNFLGGTPKCPGQNSQSPTSNHSPTSCPPTCPGYRWMCLRRFIIFLFILLLCLIFLLVLLDYKGMLPVCPLLPGTSTTSTGPCKTCTIPAQNTSMFPSCCCTKPSDGNCTCIPIPSSWAFARFLWEWASVRFSWLSLLVPFVQWSAGLSPTVWLSVIWTMWYWGPSLYNILSPFLPLLPILCCLWAYI

SEQ ID NO: 60 - protein, 281 aa, Hepatitis B virus
MQWNSTTFHQALQDPRVRGLYFPAGGSSSGTVNPVPTTASLISSIFSRIGDPAPNMESITSGFLGPLLVLQAGFFLLTKILTIPQSLDSWWTSLNFLGGAPVCLGQNSQSPTSNHSPTSCPPICPGYRWMCLRRFIIFLFILLLCLIFLLVLLDYQGMLPVCPLIPGSSTTSTGPCRTCMTLAQGTSMFPSCCCSKPSDGNCTCIPIPSSWAFGKFLWEWASARFSWLSLLVPFVQWFAGLSPTVWLSVIWMMWYWGPSLYDILSPFIPLLPIFFCLWVYI

SEQ ID NO: 61 - protein, 226 aa, Hepatitis B virus
MESITSGFLGPLLVLQAGFFLLTKILTIPQSLDSWWTSLNFLGGAPVCLGQNSQSPTSNHSPTSCPPICPGYRWMCLRRFIIFLFILLLCLIFLLVLLDYQGMLPVCPLIPGSSTTSTGPCRTCMTLAQGTSMFPSCCCSKPSDGNCTCIPIPSSWAFGKFLWEWASARFSWLSLLVPFVQWFAGLSPTVWLSVIWMMWYWGPSLYDILSPFIPLLPIFFCLWVYI

SEQ ID NO: 62 - protein, 982 aa, Eastern equine encephalitis virus (EEEV)
MSLATVMCVLANITFPCDQPPCMPCCYEKNPHETLTMLEQNYDSRAYDQLLDAAVKCNARRTRRDLDTHFTQYKLARPYIADCPNCGHSRCDSPIAIEEVRGDAHAGVIRIQTSAMFGLKTDGVDLAYMSFMNGKTQKSIKIDNLHVRTSAPCSLVSHHGYYILAQCPPGDTVTVGFHDGPNRHTCTVAHKVEFRPVGREKYRHPPEHGVELPCNRYTHKRADQGHYVEMHQPGLVADHSLLSIHSAKVKITVPSGAQVKYYCKCPDVREGITSSDHTTTCTDVKQCRAYLIDNKKWVYNSGRLPRGEGDTFKGKLHVPFVPVKAKCIATLAPEPLVEHKHRTLILHLHPDHPTLLTTRSLGSDANPTRQWIERPTTVNFTVTGEGLEYTWGNHPPKRVWAQESGEGNPHGWPHEVVVYYYNRYPLTTIIGLCTCVAIIMVSCVTSVWLLCRTRNLCITPYKLAPNAQVPILLALLCCIKPTRADDTLQVLNYLWNNNQNFFWMQTLIPLAALIVCMRMLRCLFCCGPAFLLVCGALGAAAYEHTAVMPNKVGIPYKALVERPGYAPVHLQIQLVNTRIIPSTNLEYITCKYKTKVPSPVVKCCGATQCTSKPHPDYQCQVFTGVYPFMWGGAYCFCDTENTQMSEAYVERSEECSIDHAKAYKVHTGTVQAMVNITYGSVSWRSADVYVNGETPAKIGDAKLIIGPLSSAWSPFDNKVVVYGHEVYNYDFPEYSTGKAGSFGDLQSRTSTSNDLYANTNLKLQRPQAGIVHTPFTQAPSGFERWKRDKGAPLNDVAPFGCSIALEPLRAENCAVGSIPISIDIPDAAFTRISETPTVSDLECKITECTYASDFGGIATVAYKSSKAGNCPIHSPSGVAVIKENDVTLAESGSFTFHFSTANIHPAFKLQVCTSAVTCKGDCKPPKDHIVDYPAQHTESFTSAISATAWSWLKVLVGGTSAFIVLGLIATAVVALVLFFHRH

SEQ ID NO: 63 - protein, 981 aa, Venezuelan equine encephalitis viruses (VEEV)
MSLVTTMCLLANVTFPCAEPPICYDRKPAETLAMLSVNVDNPGYDELLEAAVKCPGRKRRSTKELFKEYKLTRPYMARCIRCAVGSCHSPIAIEAVKSDGHDGYVRLQTSSQYGLDSSGNLKGRTMRYDMHGTIEEIPLHQVSLHTSRPCHIVDGHGYFLLARCPAGDSITMEFKKGSVTHSCSVPYEVKFNPVGRELYTHPPEHGAEQACQVYAHDAQNRGAYVEMHLPGSEVDSSLISLSGSSVTVTPPVGTSALVECKCGGTKISETINKAKQFSQCTKKEQCRAYRLQNDKWVYNSDKLPKAAGATLKGKLHVPFLLADGKCTVPLAPEPMITFGFRSVSLKLHPKNPTYLTTRQLADEPHYTHELISEPAVRNFTVTEKGWEFVWGNHPPKRFWAQETAPGNPHGLPHEVITHYYHRYPMSTILGLSICAAIVTVSVAASTWLFCKSRVSCLTPYRLTPNARMPLCLAVLCCARTARAETTWESLDHLWNNNQQMFWIQLLIPLAALIVVTRLLKCVCCVVPFLVVAGAAGAGAYEHATTMPSQAGISYNTIVNRAGYAPLPISITPTKIKLIPTVNLEYVTCHYKTGMDSPAIKCCGSQECTPTNRPDEQCKVFTGVYPFMWGGAYCFCDTENTQVSKAYVMKSDDCLADHAEAYKAHTASVQAFLNITVGEHSIVTTVYVNGETPVNFNGVKLTAGPLSTAWTPFDRKIVQYAGEIYNYDFPEYGAGQPGAFGDIQSRTVSSSDLYANTNLVLQRPKAGAIHVPYTQAPSGFEQWKKDKAPSLKFTAPFGCEIYTNPIRAENCAVGSIPLAFDIPDALFTRVSETPTLSAAECTLNECVYSSDFGGIATVKYSASKSGKCAVHVPSGTATLKEAAVELTEQGSATIHFSTANIHPEFRLQICTSYVTCKGDCHPPKDHIVTHPQYHAQTFTAAVSKTAWTWLTSLLGGSAVIIIIGLVLATIVAMYVLTNQKHN

SEQ ID NO: 64 - protein, 978 aa, Western equine encephalitis virus (WEEV)
MSLVTALCVLSNVTFPCDKPPVCYSLAPERTLDVLEENVNNPNYDTLLENVLKCPSRRPKRSITDDFTLTSPYLGFCPYCRHSAPCFSPIKIENVWDESDDGSIRIQVSAQFGYDQAGTADVTKFRYMSYDHDHDIKEDSVKKIAISTSGPCRRLGHKGYFLLAQCPPGDSVTVSITSGASENSCTVEKKIRRKFVGREEYLFPPVHGKLVKCHVYDHLKETSAGYITMHRPGPHAYKSYLEEASGEVYIKPPSGKNVTYECKCGDYSTGIVSTRTKMNGCTKAKQCIAYKSDQTKWVYNSPDLIRHTDHSVQGKLHIPFRLTPTFCPVPLAHTPTVTKWFKGITLHLTATRPTLLTTRKLGLRADATAEWITGTTSRNFSVGREGLEYVWGNHEPVRVWAQESAPGDPHGWPHEIIIHYYHRHPVYTVIVLCGVALAILVGIASSAACIAKARRDCLTPYALAPNATVPTALAVLCCIRPTNAETFGETLNHLWFNNQPFLWAQLCIPLAALIILFRCFSCCMPFLLVAGVCLGKVDAFEHATTVPNVPGIPYKALVERAGYAPLNLEITVVSSELTPSTNKEYVTCKFHTVIPSPQVKCCGSLECKASSKADYTCRVFGGVYPFMWGGAQCFCDSENTQLSEAYVEFAPDCTIDHAVALKVHTAALKVGLRIVYGNTTAHLDTFVNGVTPGSSRDLKVIAGPISAAFSPFDHKVVIRKGLVYNYDFPEYGAMKPGAFGDIQASSLDATDIVARTDIRLLKPSVKNIHVPYTQAVSGYEMWKNNSGRPLQETAPFGCKIEVEPLRASNCAYGHIPISIDIPDAAFVRSSESPTILEVSCTVADCIYSADFGGSLTLQYKADREGHCPVHSHSTTAVLKEATTHVTATGSITLHFSTSSPQANFIVSLCGKKTTCNAECKPPADHIIGEPHKVDQEFQAAVSKTSWNWLLALFGGASSLIAVGLIVLVCSSMLINTRR

SEQ ID NO: 65 - protein, 987 aa, Semliki Forest virus
MSAPLITAMCVLANATFPCFQPPCVPCCYENNAEATLRMLEDNVDRPGYYDLLQAALTCRNGTRHRRSVSQHFNVYKATRPYIAYCADCGAGHSCHSPVAIEAVRSEATDGMLKIQFSAQIGIDKSDNHDYTKIRYADGHAIENAVRSSLKVATSGDCFVHGTMGHFILAKCPPGEFLQVSIQDTRNAVRACRIQYHHDPQPVGREKFTIRPHYGKEIPCTTYQQTTAETVEEIDMHMPPDTPDRTLLSQQSGNVKITVGGKKVKYNCTCGTGNVGTTNSDMTINTCLIEQCHVSVTDHKKWQFNSPFVPRADEPARKGKVHIPFPLDNITCRVPMAREPTVIHGKREVTLHLHPDHPTLFSYRTLGEDPQYHEEWVTAAVERTIPVPVDGMEYHWGNNDPVRLWSQLTTEGKPHGWPHQIVQYYYGLYPAATVSAVVGMSLLALISIFASCYMLVAARSKCLTPYALTPGAAVPWTLGILCCAPRAHAASVAETMAYLWDQNQALFWLEFAAPVACILIITYCLRNVLCCCKSLSFLVLLSLGATARAYEHSTVMPNVVGFPYKAHIERPGYSPLTLQMQVVETSLEPTLNLEYITCEYKTVVPSPYVKCCGASECSTKEKPDYQCKVYTGVYPFMWGGAYCFCDSENTQLSEAYVDRSDVCRHDHASAYKAHTASLKAKVRVMYGNVNQTVDVYVNGDHAVTIGGTQFIFGPLSSAWTPFDNKIVVYKDEVFNQDFPPYGSGQPGRFGDIQSRTVESNDLYANTALKLARPSPGMVHVPYTQTPSGFKYWLKEKGTALNTKAPFGCQIKTNPVRAMNCAVGNIPVSMNLPDSAFTRIVEAPTIIDLTCTVATCTHSSDFGGVLTLTYKTNKNGDCSVHSHSNVATLQEATAKVKTAGKVTLHFSTASASPSFVVSLCSARATCSASCEPPKDHIVPYAASHSNVVFPDMSGTALSWVQKISGGLGAFAIGAILVLVVVTCIGLRR

SEQ ID NO: 66 - protein, 982 aa, Sindbis virus
MSAAPLVTAMCLLGNVSFPCDRPPTCYTREPSRALDILEENVNHEAYDTLLNAILRCGSSGRSKRSVIDDFTLTSPYLGTCSYCHHTVPCFSPVKIEQVWDEADDNTIRIQTSAQFGYDQSGAASANKYRYMSLKQDHTVKEGTMDDIKISTSGPCRRLSYKGYFLLAKCPPGDSVTVSIVSSNSATSCTLARKIKPKFVGREKYDLPPVHGKKIPCTVYDRLKETTAGYITMHRPRPHAYTSYLEESSGKVYAKPPSGKNITYECKCGDYKTGTVSTRTEITGCTAIKQCVAYKSDQTKWVFNSPDLIRHDDHTAQGKLHLPFKLIPSTCMVPVAHAPNVIHGFKHISLQLDTDHLTLLTTRRLGANPEPTTEWIVGKTVRNFTVDRDGLEYIWGNHEPVRVYAQESAPGDPHGWPHEIVQHYYHRHPVYTILAVASATVAMMIGVTVAVLCACKARRECLTPYALAPNAVIPTSLALLCCVRSANAETFTETMSYLWSNSQPFFWVQLCIPLAAFIVLMRCCSCCLPFLVVAGAYLAKVDAYEHATTVPNVPQIPYKALVERAGYAPLNLEITVMSSEVLPSTNQEYITCKFTTVVPSPKIKCCGSLECQPAAHADYTCKVFGGVYPFMWGGAQCFCDSENSQMSEAYVELSADCASDHAQAIKVHTAAMKVGLRIVYGNTTSFLDVYVNGVTPGTSKDLKVIAGPISASFTPFDHKVVIHRGLVYNYDFPEYGAMKPGAFGDIQATSLTSKDLIASTDIRLLKPSAKNVHVPYTQASSGFEMWKNNSGRPLQETAPFGCKIAVNPLRAVDCSYGNIPISIDIPNAAFIRTSDAPLVSTVKCEVSECTYSADFGGMATLQYVSDREGQCPVHSHSSTATLQESTVHVLEKGAVTVHFSTASPQANFIVSLCGKKTTCNAECKPPADHIVSTPHKNDQEFQAAISKTSWSWLFALFGGASSLLIIGLMIFACSMMLTSTRR

SEQ ID NO: 67 - protein, 981 aa, Chikungunya virus (CHIKV)
MCLLANTTFPCSQPPCTPCCYEKEPEETLRMLEDNVMRPGYYQLLQASLTCSPHRQRRSTKDNFNVYKATRPYLAHCPDCGEGHSCHSPVALERIRNEATDGTLKIQVSLQIGIKTDDSHDWTKLRYMDNHMPADAERAGLFVRTSAPCTITGTMGHFILARCPKGETLTVGFTDSRKISHSCTHPFHHDPPVIGREKFHSRPQHGKELPCSTYVQSTAATTEEIEVHMPPDTPDRTLMSQQSGNVKITVNGQTVRYKCNCGGSNEGLTTTDKVINNCKVDQCHAAVTNHKKWQYNSPLVPRNAELGDRKGKIHIPFPLANVTCRVPKARNPTVTYGKNQVIMLLYPDHPTLLSYRNMGEEPNYQEEWVMHKKEVVLTVPTEGLEVTWGNNEPYKYWPQLSTNGTAHGHPHEIILYYYELYPTMTVVVVSVATFILLSMVGMAAGMCMCARRRCITPYELTPGATVPFLLSLICCIRTAKAATYQEAAIYLWNEQQPLFWLQALIPLAALIVLCNCLRLLPCCCKTLAFLAVMSVGAHTVSAYEHVTVIPNTVGVPYKTLVNRPGYSPMVLEMELLSVTLEPTLSLDYITCEYKTVIPSPYVKCCGTAECKDKNLPDYSCKVFTGVYPFMWGGAYCFCDAENTQLSEAHVEKSESCKTEFASAYRAHTASASAKLRVLYQGNNITVTAYANGDHAVTVKDAKFIVGPMSSAWTPFDNKIVVYKGDVYNMDYPPFGAGRPGQFGDIQSRTPESKDVYANTQLVLQRPAVGTVHVPYSQAPSGFKYWLKERGASLQHTAPFGCQIATNPVRAVNCAVGNMPISIDIPEAAFTRVVDAPSLTDMSCEVPACTHSSDFGGVAIIKYAASKKGKCAVHSMTNAVTIREAEIEVEGNSQLQISFSTALASAEFRVQVCSTQVHCAAECHPPKDHIVNYPASHTTLGVQDISATAMSWVQKITGGVGLVVAVAALILIVVLCVSFSRH

SEQ ID NO: 68 - protein, 503 aa, Bornavirus BoDV-1
MQLSMSSLIGFGTLVLALSAQTFDLQGLSCNTDSTPGLIDLEIRRLCHTPTENVISCEVSYLNHTTISLPAVHTSCLKYHCKTYWGFFGSYSADRIINRYTGTVKGCLNNSAPEDPFECNWFYCCSAITTEICRCSITNVTVAVQTFPPFMYCSFADCSTVSQQELESGKAMLSDGSTLTYTPYILQSEVVNKTLNGTILCNSSSKIVSFDEFRRSYSLANGSYQSSSINVTCVNYTSSCRSKLRRRRRDTQQIEYLVHKLRPTLKDAWEDCEILQSLLLGVFGTGIASASQFLRGWLNHPDIIGYIVNGVGVVWQCHRVNVTFMAWNESTYYPPVDYNGRKYFLNDEGRLQTNTPEARPGLKRVMWFGRYFLGTVGSGVKPRRIRYNKTSHDYHLEEFEASLNMTPQTSIASGHETDPINHAYGTQADLLPYTRSSNITSTDTGSGWVHIGLPSFAFLNPLGWLRDLLAWAAWLGGVLYLISLCVSLPASFARRRRLGRWQE

SEQ ID NO: 69 - protein, 496 aa, Tick-borne encephalitis virus (TBEV)
SRCTHLENRDFVTGTQGTTRVTLVLELGGCVTITAEGKPSMDVWLDAIYQENPAQTREYCLHAKLSDTKVAARCPTMGPATLAEEHQGGTVCKRDQSDRGWGNHCGLFGKGSIVACVKAACEAKKKATGHVYDANKIVYTVKVEPHTGDYVAANETHSGRKTASFTVSSEKTILTMGEYGDVSLLCRVASGVDLAQTVILELDKTVEHLPTAWQVHRDWFNDLALPWKHEGARNWNNAERLVEFGAPHAVKMDVYNLGDQTGVLLKALAGVPVAHIEGTKYHLKSGHVTCEVGLEKLKMKGLTYTMCDKTKFTWKRAPTDSGHDTVVMEVTFSGTKPCRIPVRAVAHGSPDVNVAMLITPNPTIENNGGGFIEMQLPPGDNIIYVGELSYQWFQKGSSIGRVFQKTKKGIERLTVIGEHAWDFGSAGGFLSSIGKALHTVLGGAFNSIFGGVGFLPKLLLGVALAWLGLNMRNPTMSMSFLLAGVLVLAMTLGVGA

SEQ ID NO: 70 - protein, 612 aa, Usutu virus
STVSNCPTTGEAHNPKRAEDTYVCKSGVTDRGWGNGCGLFGKGSIDTCANFTCSLKAMGRMIQPENVKYEVGIFIHGSTSSDTHGNYSSQLGASQAGRFTITPNSPAITVKMGDYGEISVECEPRNGLNTEAYYIMSVGTKHFLVHREWFNDLALPWTSPASSNWRNREILLEFEEPHATKQSVVALGSQEGALHQALAGAVPVSFSGSVKLTSGHLKCRVKMEKLTLKGTTYGMCTEKFSFAKNPADTGHGTVVLELQYTGSDGPCKIPISIVASLSDLTPIGRMVTANPYVASSEANAKVLVEMEPPFGDSYIVVGRGDKQINHHWHKAGSSIGKAFITTIKGAQRLAALGDTAWDFGSVGGIFNSVGKAVHQVFGGAFRTLFGGMSWITQGLMGALLLWMGVNARDRSIALVMLATGGVLLFLATNVHADSGCAIDVGRRELRCGQGIFIHNDVEAWVDRYKFMPETPKQLAKVIEQAHAKGICGLRSVSRLEHVMWENIRDELNTLLRENAVDLSVVVEKPKGMYKSAPQRLALTSEEFEIGWKAWGKSLVFAPELANHTFVVDGPETKECPDAKRAWNSLEIEDFGFGIMSTRVWLKVREHNTTDCD

SEQ ID NO: 71 - protein, 501 aa, St. Louis encephalitis virus
FNCLGTSNRDFVEGASGATWIDLVLEGGSCVTVMAPEKPTLDFKVMKMEATELATVREYCYEATLDTLSTVARCPTTGEAHNTKRSDPTFVCKRDVVDRGWGNGCGLFGKGSIDTCAKFTCKSKATGKTILRENIKYEVAIFVHGSTDSTTHGNYFEQIGKNQAARFTISPQAPSFTANMGEYGTVTIDCEARSGINTEDYYVFTVKEKSWLVNRDWFHDLNLPWTSPATTDWRNRETLVEFEEPHATKQTVVALGSQEGALHTALAGAIPATVSSSTLTLQSGHLKCRAKLDKVKIKGTTYGMCDSAFTFSKNPADTGHGTVIVELQYTGSNGPCRVPISVTANLMDLTPVGRLVTVNPFISTGGANNKVMVEVEPPFGDSYIVVGRGTTQINYHWHKEGSSIGKALATTWKGAQRLAVLGDTAWDFGSIGGVFNSIGKAVHQVFGGAFRTLFGGMSWITQGLLGALLLWMGLQARDRSISLTLLAVGGILIFLATSVQA

SEQ ID NO: 72 - protein, 472 aa, Yellow fever virus
VGPAYSAHCIGITDRDFIEGVHGGTWVSATLEQDKCVTVMAPDKPSLDISLETVAIDRPAEVRKVCYNAVLTHVKINDKCPSTGEAHLAEENEGDNACKRTYSDRGWGNGCGLFGKGSIVACAKFTCAKSMSLFEVDQTKIQYVIRAQLHVGAKQENWNTDIKTLKFDALSGSQEVEFIGYGKATLECQVQTAVDFGNSYIAEMETESWIVDRQWAQDLTLPWQSGSGGVWREMHHLVEFEPPHAATIRVLALGNQEGSLKTALTGAMRVTKDTNDNNLYKLHGGHVSCRVKLSALTLKGTSYKICTDKMFFVKNPTDTGHGTVVMQVKVSKGAPCRIPVIVADDLTAAINKGILVTVNPIASTNDDEVLIEVNPPFGDSYIIVGRGDSRLTYQWHKEGSSIGKLFTQTMKGVERLAVMGDTAWDFSSAGGFFTSVGKGIHTVFGSAFQGLFGGLNWITKVIMGAVLIWVGI

SEQ ID NO: 73 - protein, 495 aa, Dengue virus 2
MRCIGISNRDFVEGVSGGSWVDIVLEHGSCVTTMAKNKPTLDFELIKTEAKHPATLRKYCVEAKLTNTTTASRCPTQGEPSLNEEQDKRFVCKHSMVDRGWGNGCGLFGKGGIVTCAMFTCKKNMEGKVVQPENLEYTIVITPHSGEENAVGNDTGKHGKEIKVTPQSSITEAELTGYGTVTMECSPRTGLDFNEMVLLQMENKAWLVHRQWFLDLPLPWLPGADTQGSNWIQKETLVTFKNPHAKKQDVVVLGSQEGAMHTALTGATEIQMSSGNLLFTGHLKCRLRMDKLQLKGMSYSMCTGKFKVVKEIAETQHGTIVIRVQYEGDGSPCKIPFEIMDLEKRHVLGRLITVNPIVTEKDSPVNIEAEPPFGDSYIIIGVEPGQLKLSWFKKGSSIGQMFETTMRGAKRMAILGDTAWDFGSLGGVFTSIGKALHQVFGAIYGAAFSGVSWTMKILIGVVITWIGMNSRSTSLSVSLVLVGVVTLYLGVMVQA

SEQ ID NO: 74 - protein, 493 aa, Dengue virus 3
MRCVGVGNRDFVEGLSGATWVDVVLEHGGCVTTMAKNKPTLDIELQKTEATQLATLRKLCIEGKITNITTDSRCPTQGEAILPEEQDQNYVCKHTYVDRGWGNGCGLFGKGSLVTCAKFQCLESIEGKVVQHENLKYTVIITVHTGDQHQVGNETQGVTAEITSQASTAEAILPEYGTLGLECSPRTGLDFNEMILLTMKNKAWMVHRQWFFDLPLPWTSGATTKTPTWNRKELLVTFKNAHAKKQEVVVLGSQEGAMHTALTGATEIQTSGGTSIFAGHLKCRLKMDKLKLKGMSYAMCLNTFVLKKEVSETQHGTILIKVEYKGEDAPCKIPFSTEDGQGKAHNGRLITANPVVTKKEEPVNIEAEPPFGESNIVIGIGDKALKINWYRKGSSIGKMFEATARGARRMAILGDTAWDFGSVGGVLNSLGKMVHQIFGSAYTALFSGVSWIMKIGIGVLLTWIGLNSKNTSMSFSCIAIGIITLYLGVVVQA

SEQ ID NO: 75 - protein, 72 aa, Dengue virus 4
FGSVGGLFTSLGKAVHQVFGSVYTTMFGGVSWMIRILIGFLVLWIGTNSRNTSMAMTCIAVGGITLFLGFTV

SEQ ID NO: 76 - protein, 501 aa, Murray Valley encephalitis virus (MVEV)
FNCLGMSSRDFIEGASGATWVDLVLEGDSCITIMAADKPTLDIRMMNIEATNLALVRNYCYAATVSDVSTVSNCPTTGESHNTKRADHNYLCKRGVTDRGWGNGCGLFGKGSIDTCAKFTCSNSAAGRLILPEDIKYEVGVFVHGSTDSTSHGNYSTQIGANQAVRFTISPNAPAITAKMGDYGEVTVECEPRSGLNTEAYYVMTIGTKHFLVHREWFNDLLLPWTSPASTEWRNREILVEFEEPHATKQSVVALGSQEGALHQALAGAIPVEFSSSTLKLTSGHLKCRVKMEKLKLKGTTYGMCTEKFTFSKNPADTGHGTVVLELQYTGSDGPCKIPISSVASLNDMTPVGRMVTANPYVASSTANAKVLVEIEPPFGDSYIVVGRGDKQINHHWHKEGSSIGKAFSTTLKGAQRLAALGDTAWDFGSVGGVFNSIGKAVHQVFGGAFRTLFGGMSWISPGLLGALLLWMGVNARDKSIALAFLATGGVLLFLATNVHA

SEQ ID NO: 77 - protein, 497 aa, Powassan virus
TRCTHLENRDFVTGTQGTTRVSLVLELGGCVTITAEGKPSIDVWLEDIFQESPAETREYCLHAKLTNTKVEARCPTTGPATLPEEHQANMVCKRDQSDRGWGNHCGFFGKGSIVACAKFECEEAKKAMGHVYDSTKITYVVKVEPHTGDYLAANETNSNRKSAQFTVASEKVILRLGDYGDVSLTCKVASGIDVAQTVVMSLDSSKDHLPSAWQVHRDWFEDLALPWKHKDNQDWNSVEKLVEFGPPHAVKMDVFNLGDQTAVLLKSLAGVPLASVEGQKYHLKSGHVTCDVGLEKLKLKGTTYSMCDKAKFKWKRVPVDSGHDTVVMEVSYTGSDKPCRIPVRAVAHGVPAVNVAMLITPNPTIETNGGGFIEMQLPPGDNIIYVGDLSQQWFQKGSTIGRMFEKTRRGLERLSVVGEHAWDFGSVGGVLSSVGKAIHTVLGGAFNTLFGGVGFIPKMLLGVALVWLGLNARNPTMSMTFLAVGALTLMMTMGVGA

SEQ ID NO: 78 - protein, 564 aa, Influenza A virus
MERIVLLLAIVSLVKSDQICIGYHANKSTKQVDTIMEKNVTVTHAQDILERTHNGKLCSLNGVKPLILRDCSVAGWLLGNPMCDEFLNVPEWSYIVEKDNPINSLCYPGDFNDYEELKHLLSSTNHFEKIQIIPRSSWSNHDASSGVSSACPYIGRSSFFRNVVWLIKKDNAYPTIKRSYNNTNQEDLLILWGIHHPNDAAEQTKLYQNPTTYVSVGTSTLNQRSIPEIATRPKVNGQSGRMEFFWTILKPNDAINFESNGNFIAPEYAYKIVKKGDSAIMKSGLAYGNCDTKCQTPVGAINSSMPFHNIHPHTIGECPKYVKSDRLVLATGLRNVPQRKKRGLFGAIAGFIEGGWQGMVDGWYGYHHSNEQGSGYAADKESTQKAIDGITNKVNSIIDKMNTQFKAVGKEFNNLERRVENLNKKMEDGFLDVWTYNVELLVLMENERTLDFHDSNVKNLYDKVRLQLKDNARELGNGCFEFYHKCDNECMESVRNGTYDYPQYSEEARLNREEISGVKLESMGVYQILSIYSTVASSLALAIMIAGLSFWMCSNGSLQCRICI

SEQ ID NO: 79 - protein, 560 aa, Influenza A virus
MNTQILVFALIAIIPTNADKICLGHHAVSNGTKVNTLTERGVEVVNATETVERTNIPRICSKGKRTVDLGQCGLLGTITGPPQCDQFLEFSADLIIERREGSDVCYPGKFVNEEALRQILRESGGIDKEAMGFTYSGIRTNGATSACRRSGSSFYAEMKWLLSNTDNAAFPQMTKSYKNTRKSPALIVWGIHHSVSTAEQTKLYGSGNKLVTVGSSNYQQSFVPSPGARPQVNGISGRIDFHWLMLNPNDTVTFSFNGAFIAPDRASFLRGKSMGIQSGVQVDANCEGDCYHSGGTIISNLPFQNIDSRAVGKCPRYVKQRSLLLATGMKNVPEIPKGRGLFGAIAGFIENGWEGLIDGWYGFRHQNAQGEGTAADYKSTQSAIDQITGKLNRLIEKTNQQFELIDNEFNEVEKQIGNVINWTRDSITEVWSYNAELLVAMENQHTIDLADSEMDKLYERVKRQLRENAEEDGTGCFEIFHKCDDDCMASIRNNTYDHSKYREEAMQNRIQIDPVKLSSGYKDVILWFSFGASCFILLAIVMGLVFICVKNGNMRCTICI

SEQ ID NO: 80 - protein, 469 aa, Influenza A virus
MNPNQKIITIGSICMIVGIISLILQIGNIISIWVSHSIQTGNQNQPEICNQSIITYENNTWVNQTYVNISNTNFVTEQALAPVALAGNSSLCPISGWAIYSKDNGIRIGSKGDVFVIREPFISCSHLECRTFFLTQGALLNDKHSNGTVKDRSPYRTLMSCPIGESPSPYNSRFESVAWSASACHDGIGWLTIGISGPDNGAVAVLKYNGIITDTIKSWRNNILRTQESECACMNGSCFTIMTDGPSNGQASYKIFKIEKGKVVKSVELNAPNYHYEECSCYPDAGEIMCVCRDNWHGSNRPWVSFNQNLEYQIGYICSGVFGDNPRPNDGAGSCGPVSSNGAYGVKGFSFKYGKGVWIGRTKSTSSRSGFEMIWDPNGWTETDSSFSVKQDIVAITDWSGYSGSFVQHPELTGLDCMRPCFWVELIRGRPKENTIWTSGSSISFCGVNSDTVGWSWPDGAELPFTIDK

SEQ ID NO: 81 - protein, 607 aa, Canine Distemper Virus
MLSYQDKVGAFYKDNARANSSKLSLVTEEQGGRRPPYLLFVLLILLVGIMALLAITGVRFHQVSTSNMEFSRLLKEDMEKSEAVHHQVIDVLTPLFKIIGDEVGLRLPQKLNEIKQFILQKTNFFNPNREFDFRDLHWCINPPSKIKVNFTNYCDTIGIRKSIASAANPILLSAHTGGRGDIFPPYRCSGATTSVGRVFPLSVSLSMSLISRTSEIINMLTAISDGVYGKTYLLVPDYIEGEFDTQKIRVFEIGFIKRWLNDMPLLQTTNYMVLPENSKAKVCTIAVGELTLASLCVDESTILLYHDSNGSQDGILVVTLGIFGATPMDQVEEVIPVAHPSVEKIHITNHRGFIKDSIATWMVPALVSEKQEEQKSCLESACQRKSYPMCNQTSWEPFGGGQLPSYGRLTLPLDPSIDLQLNISFTYGPVILNGNGMDYYESPLLGSGWLTIPPKNGTVLGLINKAGRGDQFTVIPHVLTFAPRESSGNCYLPIQTSQIMDKDVLTESNLVVLPTQNFRYVIATYDISRGDHAIVYYVYDPIRTISYTHPFRLTTKGRPDFLRIECFVWDDDLWCHQFYRFETDSTNSTTSVENLVRIRFSCSRSKP

SEQ ID NO: 82 - protein, 511 aa, Vesicular stomatitis Alagoas virus
MTPAFILCMLLAGSSWAKFTIVFPQSQKGDWKDVPPNYRYCPSSADQNWHGDLLGVNIRAKMPKVHKAIKADGWMCHAAKWVTTCDYRWYGPQYITHSIHSFIPTKAQCEESIKQTKEGVWINPGFPPKNCGYASVSDAESIIVQATAHSVMIDEYSGDWLDSQFPTGRCTGSTCETIHNSTLWYADYQVTGLCDSALVSTEVTFYSEDGLMTSIGRQNTGYRSNYFPYEKGAAACRMKYCTHEGIRLPSGVWFEMVDKELLESVQMPECPAGLTISAPTQTSVDVSLILDVERMLDYSLCQETWSKVHSGLPISPVDLGYIAPKNPGAGPAFTIVNGTLKYFDTRYLRIDIEGPVLKKMTGKVSGTPTKRELWTEWFPYDDVEIGPNGVLKTPEGYKFPLYMIGHGLLDSDLQKTSQAEVFHHPQIAEAVQKLPDDETLFFGDTGISKNPVEVIEGWFSNWRSSVMAIVFAILLLVITVLMVRLCVAFRHFCCQKRHKIYNDLEMNQLRR

SEQ ID NO: 83 - protein, 505 aa, American bat vesiculovirus
MVRIICWLGLVLSVQAAKVILPVKLESDWVPVYSGERICQSHREKIPPGIYESLKVEGQVPVRQQSQGADGYYCHKTIYSVLCDFKWYGVKRVRHSVKRDTPSYSECLKAVDDEISGMSEYVGFPPPSCNYLVETRSQNIEIILSKHSVKIDDYKQSWMDSTFLDGGCSHAPCLTTVPGTLWIPTDNLTSACDITFRKQEFTIYYPKQKPAHLSSDQIFITSPYHPVSSLSKSCLITLCGKTGIRLPGGSWSSLDNHKSFHDIKIETLLSNCKSSTEIYSSPPDLRNIRMVWDLERVIENSLCQGTWDKIETRQKITPLDLNYLSPSEPGPGWGFIPKNGSIHKAQILYIRADVDDDTIALGQKYNKGKDEFYFNWNDWELLNGIKIGPNGIITNTHVRIPYYSVGIGKLDEDMITPDEVGVIHHIDHLKQRVLVQTNLDRVWIHEGENGDLITSVSHWWHDVIKHSWEIFALIGGLFSLSCICSLCSCRKKRRESRHQETMSFV

SEQ ID NO: 84 - protein, 523 aa, Carajas vesiculovirus
MKMKMVIAGLILCIGILPAIGKITISFPQSLKGDWRPVPKGYNYCPTSADKNLHGDLIDIGLRLRAPKSFKGISADGWMCHAARWITTCDFRWYGPKYITHSIHSFRPSNDQCKEAIRLTNEGNWINPGFPPQSCGYASVTDSESVVVTVTKHQVLVDEYSGSWIDSQFPGGSCTSPICDTVHNSTLWHADHTLDSICDQEFVAMDAVLFTESGKFEEFGKPNSGIRSNYFPYESLKDVCQMDFCKRKGFKLPSGVWFEIEDAEKSHKAQVELKIKRCPHGAVISAPNQNAADINLIMDVERILDYSLCQATWSKIQNKEALTPIDISYLGPKNPGPGPAFTIINGTLHYFNTRYIRVDIAGPVTKEITGFVSGTSTSRVLWDQWFPYGENSIGPNGLLKTASGYKYPLFMVGTGVLDADIHKLGEATVIEHPHAKEAQKVVDDSEVIFFGDTGVSKNPVEVVEGWFSGWRSSLMSIFGIILLIVCLVLIVRILIALKYCCVRHKKRTIYKEDLEMGRIPRRA

SEQ ID NO: 85 - protein, 530 aa, Chandipura vesiculovirus
MTSSVTISVILLISFIAPSYSSLSIAFPENTKLDWKPVTKNTRYCPMGGEWFLEPGLQEESFLSSTPIGATPSKSDGFLCHAAKWVTTCDFRWYGPKYITHSIHNIKPTRSDCDTALASYKSGTLVSPGFPPESCGYASVTDSEFLVIMITPHHVGVDDYRGHWVDPLFVGGECDQSYCDTIHNSSVWIPADQTKKNICGQSFTPLTVTVAYDKTKEIAAGAIVFKSKYHSHMEGARTCRLSYCGRNGIKFPNGEWVSLDVKTKIQEKPLLPLFKECPAGTEVRSTLQSDGAQVLTSEIQRILDYSLCQNTWDKVERKEPLSPLDLSYLASKSPGKGLAYTVINGTLSFAHTRYVRMWIDGPVLKEMKGKRESPSGISSDIWTQWFKYGDMEIGPNGLLKTAGGYKFPWHLIGMGIVDNELHELSEANPLDHPQLPHAQSIADDSEEIFFGDTGVSKNPVELVTGWFTSWKESLAAGVVLILVVVLIYGVLRCFPVLCTTCRKPKWKKGVERSDSFEMRIFKPNNMRARV

SEQ ID NO: 86 - protein, 512 aa, Cocal vesiculovirus
MNFLLLTFIVLPLCSHAKFSIVFPQSQKGNWKNVPSSYHYCPSSSDQNWHNDLLGITMKVKMPKTHKAIQADGWMCHAAKWITTCDFRWYGPKYITHSIHSIQPTSEQCKESIKQTKQGTWMSPGFPPQNCGYATVTDSVAVVVQATPHHVLVDEYTGEWIDSQFPNGKCETEECETVHNSTVWYSDYKVTGLCDATLVDTEITFFSEDGKKESIGKPNTGYRSNYFAYEKGDKVCKMNYCKHAGVRLPSGVWFEFVDQDVYAAAKLPECPVGATISAPTQTSVDVSLILDVERILDYSLCQETWSKIRSKQPVSPVDLSYLAPKNPGTGPAFTIINGTLKYFETRYIRIDIDNPIISKMVGKISGSQTERELWTEWFPYEGVEIGPNGILKTPTGYKFPLFMIGHGMLDSDLHKTSQAEVFEHPHLAEAPKQLPEEETLFFGDTGISKNPVELIEGWFSSWKSTVVTFFFAIGVFILLYVVARIVIAVRYRYQGSNNKRIYNDIEMSRFRK

SEQ ID NO: 87 - protein, 511 aa, Indiana vesiculovirus
MKCLLYLAFLSIGVNCKFTIVFPHNQKGTWKNVPSNYHYCPSSSDLNWHNDLIGTALQVKMPKSHKAIQADGWMCHASKWVTTCDFRWYGPKYITHSIRSFTPSVEQCRESIEQTKQGTWLNPGFPPQSCGYATVTDAEAVIVQVTPHHVLVDEYTGEWVDSQFINGKCSNDICPTVHNSTTWHSDYKVKGLCDSNLISMDITFFSEDGELSSLGKEGTGFRSNHFAYETGDKACKMQYCKHWGVRLPSGVWFEMADQDLFAAARFPECPEGSSISAPSQTSVDVSLIQDVERILDYSLCQETWSKIGAGLPISPVDLSYLAPKNPGTGPAFTIINGTLKYFETRYIRVDIAAPILSRMVGMISGTTTERELWDDWAPYEDVEIGPNGVLRTSSGYKFPLYMIGHGMLDSDLHLSSKAQVFEHPHIQDAASQLPDDETLFFGDTGLSKNPIELVEGWFSGWKSSIASFFFIIGLIIGLFLVLRVGIYLCIKLKHTKKRQIYTDIEMNRLGK

SEQ ID NO: 88 - protein, 523 aa, Isfahan vesiculovirus
MTSVLFMVGVLLGAFGSTHCSIQIVFPSETKLVWKPVLKGTRYCPQSAELNLEPDLKTMAFDSKVPIGITPSNSDGYLCHAAKWVTTCDFRWYGPKYITHSVHSLRPTVSDCKAAVEAYNAGTLMYPGFPPESCGYASITDSEFYVMLVTPHPVGVDDYRGHWVDPLFPTSECNSNFCETVHNATMWIPKDLKTHDVCSQDFQTIRVSVMYPQTKPTKGADLTLKSKFHAHMKGDRVCKMKFCNKNGLRLGNGEWIEVGDEVMLDNSKLLSLFPDCLVGSVVKSTLLSEGVQTALWETDRLLDYSLCQNTWEKIDRKEPLSAVDLSYLAPRSPGKGMAYIVANGSLMSAPARYIRVWIDSPILKEIKGKKESASGIDTVLWEQWLPFNGMELGPNGLIKTKSGYKFPLYLLGMGIVDQDLQELSSVNPVDHPHVPIAQAFVSEGEEVFFGDTGVSKNPIELISGWFSDWKETAAALGFAAISVILIIGLMRLLPLLCRRRKQKKVIYKDVELNSFDPRQAFHR

SEQ ID NO: 89 - protein, 524 aa, Jurona vesiculovirus
MESLPFSALLAVLSITLCDSAIPIFFPSEPQLEWKPVLPGSRYCPQSNEMSLDPDLKKSTISVKVPIGVTPSKSDGYLCHGAKWVSTCDFRWYGPKYITHSIHNLRPTTNDCEDAIKKYEAGTLINPGFPPDSCAYATVTDSEHLVILITPHHVGVDDYRGAWVDDSFPSGVCETNQCDTTHNSSIWIPKTKTRHNICSQTFANLSVTISYREGGAMKGADMVFHSKYHPHMVGGHICKMNFCNKQGLRLQNEEWIEIPSGTKVGNQDLMNLFSDCKSGLEVRSTLRSEGANTLTWETQRLLDYALCQNTWDKFDNQGAVSALDLSYLAARAPGKGVAYTMINGTLHSAPTRYVRMWIESPSMEELKAKKESSSGVETSIWNQWFPFKGGEIGPNGLIKAGNKYKFPLYLVGMGMLDDEINALELGGPIDHPQRAHAQAVLGDEETLFFGDTGVGKNPVELITGWFSGWKETIMAVVAIFLLVIVLYGVLRCCPTICVLCKRKSRHRTKDMEMQYIPNNQRHWR

SEQ ID NO: 90 - protein, 521 aa, Malpais Spring vesiculovirus
MESLLKAICVLLLIHCSRCDLPIVFPDQKELLWNPVLKTNRYCPQTREIAPLDKPKTLKITTGVPVRSPKEKIEGYLCHSGKWVTTCDYRWYGAKYVTHSIHHLKPTDQMCRDAISQYNGGTLLNPGFPPEVCGYASVTDSELIITLITPHTVGVDDYRGLWIDPSFPNGECNSIVCETIHNSTKWVSKGEMPTDICQQTFTTIKMDVSYPSDTTSQGSLLSFHSPYHPHISGKDICKMSYCGSNGLRLPNGEWFSIINTSKIGNKNLIDFFSPCKAGVEVRSTLQSEGSQTIAWETQRMLDYALCQNTWDKFERGEPLSPLDLNYLAPRVPGKGMAYTIINNTLHSSHAVYRRVWIEGPIIGEMKGKIESATGVAKEIWAQWFEFGQNKIGPNGVIKTNDGIKFPLYAIGTGLIDQDIHELSEVSPMDHPHLVHAKKYVSEDDEIYFGDTGVSHNPVEIFSGWFTNWKEGLMKFSILVLSILIFYVVIRLVMCIPLKCKKERKPRLEFELQPREWEYSRA

SEQ ID NO: 91 - protein, 512 aa, Maraba vesiculovirus
MLRLFLFCFLALGAHSKFTIVFPHHQKGNWKNVPSTYHYCPSSSDQNWHNDLTGVSLHVKIPKSHKAIQADGWMCHAAKWVTTCDFRWYGPKYITHSIHSMSPTLEQCKTSIEQTKQGVWINPGFPPQSCGYATVTDAEVVVVQATPHHVLVDEYTGEWIDSQLVGGKCSKEVCQTVHNSTVWHADYKITGLCESNLASVDITFFSEDGQKTSLGKPNTGFRSNHFAYESGEKACRMQYCTQWGIRLPSGVWFELVDKDLFQAAKLPECPRGSSISAPSQTSVDVSLIQDVERILDYSLCQETWSKIRAKLPVSPVDLSYLAPKNPGSGPAFTIINGTLKYFETRYIRVDISNPIIPHMVGTMSGTTTERELWNDWYPYEDVEIGPNGVLKTPTGFKFPLYMIGHGMLDSDLHKSSQAQVFEHPHAKDAASQLPDDETLFFGDTGLSKNPVELVEGWFSSWKSTLASFFLIIGLGVALIFIIRIIVAIRYKYKGRKTQKIYNDVEMSRLGNK

SEQ ID NO: 92 - protein, 513 aa, Morreton vesiculovirus
MLVLYLLLSLLALGAQCKFTIVFPHNQKGNWKNVPANYQYCPSSSDLNWHNGLIGTSLQVKMPKSHKAIQADGWMCHAAKWVTTCDFRWYGPKYVTHSIKSMIPTVDQCKESIAQTKQGTWLNPGFPPQSCGYASVTDAEAVIVKATPHQVLVDEYTGEWVDSQFPTGKCNKDICPTVHNSTTWHSDYKVTGLCDANLISMDITFFSEDGKLTSLGKEGTGFRSNYFAYENGDKACRMQYCKHWGVRLPSGVWFEMADKDIYNDAKFPDCPEGSSIAAPSQTSVDVSLIQDVERILDYSLCQETWSKIRAHLPISPVDLSYLSPKNPGTGPAFTIINGTLKYFETRYIRVDIAGPIIPQMRGVISGTTTERELWTDWYPYEDVEIGPNGVLKTATGYKFPLYMIGHGMLDSDLHISSKAQVFEHPHIQDAASQLPDDETLFFGDTGLSKNPIELVEGWFSGWKSTIASFFFIIGLVIGLYLVLRIGIALCIKCRVQEKRPKIYTDVEMNRLDR

SEQ ID NO: 93 - protein, 517 aa, Vesicular stomatitis New Jersey virus
MLSYLIFALVVSPILGKIEIVFPQHTTGDWKRVPHEYNYCPTSADKNSHGTQTGIPVELTMPKGLTTHQVDGFMCHSALWMTTCDFRWYGPKYITHSIHNEEPTDYQCLEAIKAYKDGVSFNPGFPPQSCGYGTVTDAEAHIVTVTPHSVKVDEYTGEWIDPHFIGGRCKGQICETVHNSTKWFTSSDGESVCSQLFTLVGGTFFSDSEEITSMGLPETGIRSNYFPYVSTEGICKMPFCRKPGYKLKNDLWFQITDPDLDKTVRDLPHIKDCDLSSSIVTPGEHATDISLISDVERILDYALCQNTWSKIEAGEPITPVDLSYLGPKNPGAGPVFTIINGSLHYFMSKYLRVELESPVIPRMEGKVAGTRIVRQLWDQWFPFGEVEIGPNGVLKTKQGYKFPLHIIGTGEVDNDIKMERIVKHWEHPHIEAAQTFLKKDDTEEVLYYGDTGVSKNPVELVEGWFSGWRSSIMGVLAVIIGFVILIFLIRLIGVLSSLFRQKRRPIYKSDVEMAHFR

SEQ ID NO: 94 - protein, 525 aa, Perinet vesiculovirus
MSSKIVLAAICLCSVQYVACSFQIVFPEFNNAAWLPYLKTSRYCPQSAEMEFERRVSTTLLSADVPIGVTPTKSDGYLCHAAKWVTTCDFRWYGPKYVTHSIHDLTPAQVDCHEALARYKAGTLFNPGFPPASCGYATITDSEQKVVMITPHHVGIDDYRGKWIDPIFPGGECTTNYCETLHNSSVWLPADEKIVDICAQTFRKIKVTATYPSEGAVTKETISLHSAYHPHVPGTGICRMTYCSKEGLRLPNGEWLGIFYDNRIKTTDVRTVFPACPDGLEVKSTLNSDGANTIAWETQRMLDYALCQSTWDKVQNKEPLSAVDLSYLSARSPGKGLAYTVINGTLHFAHVRYVRTWIDGPVLKDLKGSRFDPTAAQKTLWDQWFPFGSNEIGPNGLLKTPKDFKFPLYIIGTGLVDEDLQELSEAGPIDHPQIPDASGILPNSEQVYYGDTGVSKNPIELIEGWFANWKETVMSIVGLVLLITIVFTVLKCIGTCRSLRRKRKIEKDIELQEIGPYQPTTYRPR

SEQ ID NO: 95 - protein, 529 aa, Piry vesiculovirus
MDLFPILVVVLMTDTVLGKFQIVFPDQNELEWRPVVGDSRHCPQSSEMQFDGSRSQTILTGKAPVGITPSKSDGFICHAAKWVTTCDFRWYGPKYITHSIHHLRPTTSDCETALQRYKDGSLINLGFPPESCGYATVTDSEAMLVQVTPHHVGVDDYRGHWIDPLFPGGECSTNFCDTVHNSSVWIPKSQKTDICAQSFKNIKMTASYPSEGALVSDRFAFHSAYHPNMPGSTVCIMDFCEQKGLRFTNGEWMGLNVEQSIREKKISAIFPNCVAGTEIRATLESEGARTLTWETQRMLDYSLCQNTWDKVSRKEPLSPLDLSYLSPRAPGKGMAYTVINGTLHSAHAKYIRTWIDYGEMKEIKGGRGEYSKAPELLWSQWFDFGPFKIGPNGLLHTGKTFKFPLYLIGAGIIDEDLHELDEAAPIDHPQMPDAKSVLPEDEEIFFGDTGVSKNPIELIQGWFSNWRESVMAIVGIVLLIVVTFLAIKTVRVLNCLWRPRKKRIVRQEVDVESRLNHFEMRGFPEYVKR

SEQ ID NO: 96 - protein, 556 aa, Radi vesiculovirus
MISITFVYLIIILSLSWGEMMIPFPDVTTTTWKPVLKGEHHCPSSSDVDILSRMSTLKLQVRIPTGSVASKSDGLLCHGAKWVTTCDFRWYGSKYITHSLHSIRPTLSQCTEAAKAYKEGRLMAPGFPPESCGWNSVTDSELLSILVTPHHTGVDDYRGIWIDSMFPGGECKEMVCDTVQGHTIWMSTSNLTTACGVAFKQIQGQFYYLNSGHQPNKEGTFFHSPNHPNSPLSTACRKKYCNQEGIVIHTGEWIGVPWNTRIRDVQLDSYTDLCAESTEIKSTIGSAPIRVIAWEMERVMDFALCQTVWDKVNRGDPLSPLDLSYLSSRAPGKGLAYTIINETLHVAHVRYIRTYIKAPIMEEIKGSRGDRSAAESVLWTQWFPYGDGEIGPNGLLKTNGSFKFPFYLVGMGAIDDDLIELSNADPIDHPQKAIASVHLNTDEELFFGNTGSDSNPVEAVEGWFASWKSAGINMALIVLCVLLVLIFLRSLPALIKLIHRYRVSRSRQTDVELNSINETARTGSVGPDIIPGAWRVHDSGVRQSQFFRNNPRRLGP

SEQ ID NO: 97 - protein, 559 aa, Yug Bogdanovac vesiculovirus
MISSTLILVIISAHAFCDMIIPFPDVTTTSWKPVLRGEHHCPASNDLDMAGGLSTLKMNVKIPSGVVGSKSDGYLCHGAKWVTTCDYRWYGAKYITHSLHPLRPSTSQCFDAIKAYREGTLLSPGFPPESCGWNSVTDSELLSIQITPHHSGVDDYRGVWIDSMFPKGECDQRICDTVQEHSIWIAANNVSSACSIAFKQLEGYFYYRNSGIQPNKDGTFFHSSHHPNSPMSSCCRIKYCNQEGLRLHTGEWIGVAWNTKIRDVTLDSYTDTCPGGTEVKSTIGSSPTRVVAWEMERIMDFALCQNVWDKVNRGEQLSPLDLSYLSSRAPGKGLAYTIINETLHVAHVRYIRTWIKGPVLKEIKGRRGSSSAAEDTLWIQWFPFGDNQIGPNGLLKSNGTFKFPFYLVGVGALDEDLIEMANADPVDHLQRVDAETHMRGDEELFFGDTGVSKNPIESVEGWFSNWISGLFNISIIVLCVLSVLIVFKSVITLIRVVRRRRRPRAEEDVELNNMNPRPQTRQPVGAPNIIPGAWGIQPSHGRGVRQSQFVKRSALNIVT

SEQ ID NO: 98 - protein, 511 aa, Indiana vesiculovirus
MKCLLYLALLFIGVYCKFTTVFPHNKKGDWKNVPSNYHYCPSSSDLNWHNDLIGTALQVKMPKSHKAIQADGWMCHASKWVTTCDFRWYGPKYITHSIRSFTPSVEQCKESIEQTKQGTWLNPGFPPQSCGYATVTDAEAVIVQVTPHHVLVDEYTGEWVDSQFINGKCSDDICPTVHNSTTWHSDYKVKGLCDSNLISMDITFFSEDGELSSLGKEGTGFRSNYFAYETGDKACKMQYCKHWGVRLPSGVWFEMADKNLFAAAKFPECPEGSSISAPSQTSVDVSLIQDVERILDYSLCQETWSKIRAGLPISPVDLSYLAPKNPGTGPAFTIINGTLKYFETRYIRVDIAAPILSRMVGMISGTTTERELWEDWAPYEDVEIGPNGVLRTSSGYKFPLYMIGHGMLDSDLHLSSKAQVFEHPHIPDATSQLPDDETLFFGDTGLSKDPIELVEGWFSGWKSSIASFFFIIGLIIGLFFVLRIGVYLCIKLKHTNKRQIYTDIEMNRLGK

SEQ ID NO: 99 - protein, 511 aa, Indiana vesiculovirus
MKCLLCLAFLFIGVNCKFTIVFPHNQKGNWKNVPSNYHYCPSSSDLNWHNDLIGTALQVKMPKSHKAIQADGWMCHASKWITTCDFRWYGPKYITHSIQSFTPSVEQCKESIEQTKQGTWLNPGFPPQSCGYATVTDAEAVIVQVTPHHVLVDEYTGEWVDSQFINGKCSNDICLTVHNSTTWHSDYKVKGLCDSNLISMDITFFSEDGELSSLGKAGTGFRSNYFAYETGDKACKMQYCKHWGVRLPSGVWFEMADKDLFAAAKFPECPEGSSISAPSQTSVDVSLIQDVERILDYSLCQETWSKIRAGLPISPVDLSYLAPKNPGTGPAFTIINGTLKYFETRYIRVDIAAPILSRMVGMISGTNTERELWEDWAPYEDVEIGPNGVLRTSSGYKFPLYMIGHGMLDSDLHLSSKVQVFEHPHIQDAASQLPDDETLFFGDTGLSKNPIELVEGWFSGWKSSIASFFFIIGLIIGLFLVLRVGIYLCIKLKHTRKRKIYADIEMNRLGK

SEQ ID NO: 100 - protein, 546 aa, Nipah Virus
MVVILDKRCYCNLLILILMISECSVGILHYEKLSKIGLVKGVTRKYKIKSNPLTKDIVIKMIPNVSNMSQCTGSVMENYKTRLNGILTPIKGALEIYKNNTHDLVGDVRLAGVIMAGVAIGIATAAQITAGVALYEAMKNADNINKLKSSIESTNEAVVKLQETAEKTVYVLTALQDYINTNLVPTIDKISCKQTELSLDLALSKYLSDLLFVFGPNLQDPVSNSMTIQAISQAFGGNYETLLRTLGYATEDFDDLLESDSITGQIIYVDLSSYYIIVRVYFPILTEIQQAYIQELLPVSFNNDNSEWISIVPNFILVRNTLISNIEIGFCLITKRSVICNQDYATPMTNNMRECLTGSTEKCPRELVVSSHVPRFALSNGVLFANCISVTCQCQTTGRAISQSGEQTLLMIDNTTCPTAVLGNVIISLGKYLGSVNYNSEGIAIGPPVFTDKVDISSQISSMNQSLQQSKDYIKEAQRLLDTVNPSLISMLSMIILYVLSIASLCIGLITFISFIIVEKKRNTYSRLEDRRVRPTSSGDLYYIGT

SEQ ID NO: 101 - protein, 602 aa, Nipah Virus
MPAENKKVRFENTTSDKGKIPSKVIKSYYGTMDIKKINEGLLDSKILSAFNTVIALLGSIVIIVMNIMIIQNYTRSTDNQAVIKDALQGIQQQIKGLADKIGTEIGPKVSLIDTSSTITIPANIGLLGSKISQSTASINENVNEKCKFTLPPLKIHECNISCPNPLPFREYRPQTEGVSNLVGLPNNICLQKTSNQILKPKLISYTLPVVGQSGTCITDPLLAMDEGYFAYSHLERIGSCSRGVSKQRIIGVGEVLDRGDEVPSLFMTNVWTPPNPNTVYHCSAVYNNEFYYVLCAVSTVGDPILNSTYWSGSLMMTRLAVKPKSNGGGYNQHQLALRSIEKGRYDKVMPYGPSGIKQGDTLYFPAVGFLVRTEFKYNDSNCPITKCQYSKPENCRLSMGIRPNSHYILRSGLLKYNLSDGENPKVVFIEISDQRLSIGSPSKIYDSLGQPVFYQASFSWDTMIKFGDVLTVNPLVVNWRNNTVISRPGQSQCPRFNTCPEICWEGVYNDAFLIDRINWISAGVFLDSNQTAENPVFTVFKDNEILYRAQLASEDTNAQKTITNCFLLKNKIWCISLVEIYDTGDNVIRPKLFAVKIPEQCT

SEQ ID NO: 102 - protein, 546 aa, Hendra Virus
MATQEVRLKCLLCGIIVLVLSLEGLGILHYEKLSKIGLVKGITRKYKIKSNPLTKDIVIKMIPNVSNVSKCTGTVMENYKSRLTGILSPIKGAIELYNNNTHDLVGDVKLAGVVMAGIAIGIATAAQITAGVALYEAMKNADNINKLKSSIESTNEAVVKLQETAEKTVYVLTALQDYINTNLVPTIDQISCKQTELALDLALSKYLSDLLFVFGPNLQDPVSNSMTIQAISQAFGGNYETLLRTLGYATEDFDDLLESDSIAGQIVYVDLSSYYIIVRVYFPILTEIQQAYVQELLPVSFNNDNSEWISIVPNFVLIRNTLISNIEVKYCLITKKSVICNQDYATPMTASVRECLTGSTDKCPRELVVSSHVPRFALSGGVLFANCISVTCQCQTTGRAISQSGEQTLLMIDNTTCTTVVLGNIIISLGKYLGSINYNSESIAVGPPVYTDKVDISSQISSMNQSLQQSKDYIKEAQKILDTVNPSLISMLSMIILYVLSIAALCIGLITFISFVIVEKKRGNYSRLDDRQVRPVSNGDLYYIGT

SEQ ID NO: 103 - protein, 603 aa, Hendra Virus
MADSKLVSLNNNLSGKIKDQGKVIKNYYGTMDIKKINDGLLDSKILGAFNTVIALLGSIIIIVMNIMIIQNYTRTTDNQALIKESLQSVQQQIKALTDKIGTEIGPKVSLIDTSSTITIPANIGLLGSKISQSTSSINENVNDKCKFTLPPLKIHECNISCPNPLPFREYRPISQGVSDLVGLPNQICLQKTTSTILKPRLISYTLPINTREGVCITDPLLAVDNGFFAYSHLEKIGSCTRGIAKQRIIGVGEVLDRGDKVPSMFMTNVWTPPNPSTIHHCSSTYHEDFYYTLCAVSHVGDPILNSTSWTESLSLIRLAVRPKSDSGDYNQKYIAITKVERGKYDKVMPYGPSGIKQGDTLYFPAVGFLPRTEFQYNDSNCPIIHCKYSKAENCRLSMGVNSKSHYILRSGLLKYNLSLGGDIILQFIEIADNRLTIGSPSKIYNSLGQPVFYQASYSWDTMIKLGDVDTVDPLRVQWRNNSVISRPGQSQCPRFNVCPEVCWEGTYNDAFLIDRLNWVSAGVYLNSNQTAENPVFAVFKDNEILYQVPLAEDDTNAQKTITDCFLLENVIWCISLVEIYDTGDSVIRPKLFAVKIPAQCSES

SEQ ID NO: 104 - protein, 552 aa, Newcastle disease virus
MGSRPSTKNPAPMMLTIRVALVLSCICPANSIDGRPLAAAGIVVTGDKAVNIYTSSQTGSIIVKLLPNLPKDKEACAKAPLDAYNRTLTTLLTPLGDSIRRIQESVTTSGGGRQGRLIGAIIGGVALGVATAAQITAAAALIQAKQNAANILRLKESIAATNEAVHEVTDGLSQLAVAVGKMQQFVNDQFNKTAQELDCIKIAQQVGVELNLYLTELTTVFGPQITSPALNKLTIQALYNLAGGNMDYLLTKLGVGNNQLSSLIGSGLITGNPILYDSQTQLLGIQVTAPSVGNLNNMRATYLETLSVSTTRGFASALVPKVVTQVGSVIEELDTSYCIETDLDLYCTRIVTFPMSPGIYSCLSGNTSACMYSKTEGALTTPYMTIKGSVIANCKMTTCRCVNPPGIISQNYGEAVSLIDKQSCNVLSLGGITLRLSGEFDVTYQKNISIQDSQVIITGNLDISTELGNVNNSISNALNKLEESNRKLDKVNVKLTSTSALITYIVLTIISLVFGILSLILACYLMYKQKAQQKTLLWLGNNTLDQMRATTK

SEQ ID NO: 105 - protein, 577 aa, Newcastle disease virus
MDRAVSQVALENDEREAKNTWRLIFRIAILFLTVVTLAISVASLLYSMGASTPSDLVGIPTRISRAEEKITSTLGSNQDVVDRIYKQVALESPLALLNTETTIMNAITSLSYQINGAANNSGWGAPIHDPDYIGGIGKELIVDDASDVTSFYPSAFQEHLNFIPAPTTGSGCTRIPSFDMSATHYCYTHNVILSGCRDHSHSYQYLALGVLRTSATGRVFFSTLRSINLDDTQNRKSCSVSATPLGCDMLCSKVTETEEEDYNSAVPTRMVHGRLGFDGQYHEKDLDVTTLFGDWVANYPGVGGGSFIDSRVWFSVYGGLKPNSPSDTVQEGKYVIYKRYNDTCPDEQDYQIRMAKSSYKPGRFGGKRIQQAILSIKVSTSLGEDPVLTVPPNTVTLMGAEGRILTVGTSHFLYQRGSSYFSPALLYPMTVSNKTATLHSPYTFNAFTRPGSIPCQASARCPNSCVTGVYTDPYPLIFYRNHTLRGVFGTMLDGVQARLNPASAVFDSTSRSRITRVSSSSTKAAYTTSTCFKVVKTNKTYCLSIAEISNTLFGEFRIVPLLVEILKDDGVREARSG

SEQ ID NO: 106 - protein, 574 aa, Human respiratory syncytial virus A2
MELLILKANAITTILTAVTFCFASGQNITEEFYQSTCSAVSKGYLSALRTGWYTSVITIELSNIKENKCNGTDAKVKLIKQELDKYKNAVTELQLLMQSTPPTNNRARRELPRFMNYTLNNAKKTNVTLSKKRKRRFLGFLLGVGSAIASGVAVSKVLHLEGEVNKIKSALLSTNKAVVSLSNGVSVLTSKVLDLKNYIDKQLLPIVNKQSCSISNIETVIEFQQKNNRLLEITREFSVNAGVTTPVSTYMLTNSELLSLINDMPITNDQKKLMSNNVQIVRQQSYSIMSIIKEEVLAYVVQLPLYGVIDTPCWKLHTSPLCTTNTKEGSNICLTRTDRGWYCDNAGSVSFFPQAETCKVQSNRVFCDTMNSLTLPSEINLCNVDIFNPKYDCKIMTSKTDVSSSVITSLGAIVSCYGKTKCTASNKNRGIIKTFSNGCDYVSNKGMDTVSVGNTLYYVNKQEGKSLYVKGEPIINFYDPLVFPSDEFDASISQVNEKINQSLAFIRKSDELLHNVNAGKSTTNIMITTIIIVIIVILLSLIAVGLLLYCKARSTPVTLSKDQLSGINNIAFSN

SEQ ID NO: 107 - protein, 263 aa, Bovine respiratory syncytial virus
MSNHTHHPKFKTLKRAWKASKYFIVGLSCLYKFNLKSLVQTALTSLAMITLTSLVITAIIYISVGNAKAKPTSKPTTQQTQQPQNHTPLLPTEHNHKSTHTSTQSTTLSQPPNIDTTSGTTYGHPINRTQNRKIKSQSTPLATRKLPINPLESNPPENHQDHNNSQTLPHVPCSTCEGNPACSPLCQIGLERAPSRAPTITLKKAPKPKTTKKPTKTTIYHRTSPEAKLQTKKNTATPQQGILSSPEHQTNQSTTQISQHTSI

SEQ ID NO: 108 - protein, 574 aa, Bovine respiratory syncytial virus
MATTAMRMIISIIFISTYVTHITLCQNITEEFYQSTCSAVSRGYLSALRTGWYTSVVTIELSKIQKNVCNSTDSNVKLIKQELERYNNAVVELQSLMQNEPASSSRAKRGIPELIHYKRNSTKKFYGLMGKKRKRRFLGFLLGIGSAIASGVAVSKVLHLEGEVNKIKNALLSTNKAVVSLSNGVSVLTSKVLDLKNYIDKELLPKVNNHDCKISNIATVIEFQQKNNRLLEIAREFSVNAGITTPLSTYMLTNSELLSLINDMPITNDQKKLMSSNVQIVRQQSYSIMSVVKEEVMAYVVQLPIYGVIDTPCWKLHTSPLCTTDNKEGSNICLTRTDRGWYCDNAGSVSFFPQAETCKVQSNRVFCDTMNSLTLPTDVNLCNTDIFNAKYDCKIMTSKTDISSSVITSIGAIVSCYGKTKCTASNKNRGIIKTFSNGCDYVSNRGVDTVSVGNTLYYVNKLEGKALYIKGEPIINYYDPLVFPSDEFDASIAQVNAKINQSLAFIRRSDELLHSVDVGKSTTNVVITTIIIVIVVVILMLIAVGLLFYSKTRSTPIMLGKDQLSGINNLSFSK

SEQ ID NO: 109 - protein, 537 aa, Murine pneumonia virus
MIPGRIFLVLLVIFNTKPIHPNTLTEKYYESTCSVETAGYKSALRTGWHMTVMSIKLSQINIESCKSSNSLLAHELAIYSSAVDELRTLSSNALKSKRKKRFLGLILGLGAAVTAGVALAKTVQLESEIALIRDAVRNTNEAVVSLTNGMSVLAKVVDDLKNFISKELLPKINRVSCDVHDITAVIRFQQLNKRLLEVSREFSSNAGLTHTVSSFMLTDRELTSIVGGMAVSAGQKEIMLSSKAIMRRNGLAILSSVNADTLVYVIQLPLFGVMDTDCWVIRSSIDCHNIADKYACLARADNGWYCHNAGSLSYFPSPTDCEIHNGYAFCDTLKSLTVPVTSRECNSNMYTTNYDCKISTSKTYVSTAVLTTMGCLVSCYGHNSCTVINNDKGIIRTLPDGCHYISNKGVDRVQVGNTVYYLSKEVGKSIVVRGEPLVLKYDPLSFPDDKFDVAIRDVEHSINQTRTFFKASDQLLDLSENRENKNLNKSYILTTLLFVVMLIIIMAVIGFILYKVLKMIRDNKLKSKSTPGLTVLS

SEQ ID NO: 110 - protein, 550 aa, Measles virus
MGLKVNVSAIFMAVLLTLQTPTGQIHWGNLSKIGVVGIGSASYKVMTRSSHQSLVIKLMPNITLLNNCTRVEIAEYRRLLRTVLEPIRDALNAMTQNIRPVQSVASSRRHKRFAGVVLAGAALGVATAAQITAGIALHQSMLNSQAIDNLRASLETTNQAIEAIRQAGQEMILAVQGVQDYINNELIPSMNQLSCDLIGQKLGLKLLRYYTEILSLFGPSLRDPISAEISIQALSYALGGDINKVLEKLGYSGGDLLGILESRGIKARITHVDTESYFIVLSIAYPTLSEIKGVIVHRLEGVSYNIGSQEWYTTVPKYVATQGYLISNFDESSCTFMPEGTVCSQNALYPMSPLLQECLRGSTKSCARTLVSGSFGNRFILSQGNLIANCASILCKCYTTGTIINQDPDKILTYIAADHCPVVEVNGVTIQVGSRRYPDAVYLHRIDLGPPISLERLDVGTNLGNAIAKLEDAKELLESSDQILRSMKGLSSTSIVYILIAVCLGGLIGIPALICCCRGRCNKKGEQVGMSRPGLKPDLTGTSKSYVRSL

SEQ ID NO: 111 - protein, 550 aa, Measles virus; identical to SEQ ID NO: 110

SEQ ID NO: 112 - protein, 574 aa, Human respiratory syncytial virus B
MELLIHRLSAIFLTLAINALYLTSSQNITEEFYQSTCSAVSRGYFSALRTGWYTSVITIELSNIKETKCNGTDTKVKLIKQELDKYKNAVTELQLLMQNTPAANNRARREAPQYMNYTINTTKNLNVSISKKRKRRFLGFLLGVGSAIASGIAVSKVLHLEGEVNKIKNALLSTNKAVVSLSNGVSVLTSKVLDLKNYINNQLLPIVNQQSCRISNIETVIEFQQKNSRLLEINREFSVNAGVTTPLSTYMLTNSELLSLINDMPITNDQKKLMSSNVQIVRQQSYSIMSIIKEEVLAYVVQLPIYGVIDTPCWKLHTSPLCTTNIKEGSNICLTRTDRGWYCDNAGSVSFFPQADTCKVQSNRVFCDTMNSLTLPSEVSLCNTDIFNSKYDCKIMTSKTDISSSVITSLGAIVSCYGKTKCTASNKNRGIIKTFSNGCDYVSNKGVDTVSVGNTLYYVNKLEGKNLYVKGEPIINYYDPLVFPSDEFDASISQVNEKINQSLAFIRRSDELLHNVNTGKSTTNIMITTIIIVIIVVLLSLIAIGLLLYCKAKNTPVTLSKDQLSGINNIAFSK

SEQ ID NO: 113 - protein, 546 aa, Rinderpest virus
MKILFATLLVVTTPHLVTGQIHWGNLSKIGVVGTGSASYKVMTQSSHQTLVIKLMPNITAIDNCTKTEIEEYKRLLGTVLQPIKVALNAITKNIKPIKSSTTSRRHRRFAGVALAGAALGVATAAQITAGIALHQSMMNTQAIESLKASLETTNQAIEEIRQAGQEMILAVQGVQDYINNELVPAMGQLSCDIVGQKLGLKLLRYYTEILSLFGPSLRDPISAEISIQALSYALGGDINKILEKLGYSGSDLLAILESKGIKAKITYVDIESYFIVLSIAYPSLSEIKGVIIHRLEGVSYNIGSQEWYTTVPRYVATQGYLISNFDDTPCAFSPEGTICSQNALYPMSPLLQECFRGSTRSCARTLVSGSIGNRFILSKGNLIANCASILCKCYTTGSIISQDPDKILTYIAADQCPIVEVDGVTIQVGSREYPDAVYLHKIDLGPPISLEKLDVGTNLGNAVTKLEKAKDLLDSSDLILETIKGASVTNTGHILVGAGLIAVVGILIVTCCCRKRSNDSKVSTVILNPGLKPDLTGTSKSYVRSL

SEQ ID NO: 114 - protein, 561 aa, Simian virus 41
MRLTPYPIALTTLMIALTTLPETGLGIARDALSQVGVIQSKARSLMYYSDGSSSFIVVKLLPTLPTPSGNCNLTSITAYNTTLFKLLTPLMENLDTIVSANQAGSRRKRFAGVVVGLAALGVATAAQVTAAVAVVKANANAAAINKLAASIQSTNAAISDVISSTRTLATAIQAVQDHVNGVLASGLTEANCRSQDALIGSILNLYLTELTTIFHNQIVNPALTPLSIQALRIILGSTLPLIVESRWNTNLNTAELLSSGLLTGQIISISPSYMQMVIQITVPTFVMQPGAKIIDLVTITANRMEEEVLIQVPPRILEYANEIQAYTADDCVVTPHAVFCKYNDGSPISDSLYQCLKGNLTSCVFTPVVGNYLKRFAFANGVMYVNCKALLCRCADPPMVITQDDLAGITVIDITVCREVMLDTLAFKITSLNNVTYGANFSMLAAAIKDLSPLDLSAQLAQVNKSLASAEEKIAQSSSLAAQAVSQEATITVGSVAMLIAVLALIAGCTGIMIAVQMSRRLEVLRHLTDQSIISNHHYAELNPPPYNHSYESLHPIPQSH

SEQ ID NO: 115 - protein, 538 aa, Mumps virus
MKVFLVTCLGFAVFSSSVCVNINILQQIGYIKQQVRQLSYYSQSSSSYIVVKLLPNIQPTDNSCEFKSVTQYNKTLSNLLLPIAENINNIASPSSGSRRHKRFAGIAIGIAALGVATAAQVTAAVSLVQAQTNARAIAAMKNSIQATNRAVFEVKEGTQRLAIAVQAIQDHINTIMNTQLNNMSCQILDNQLATSLGLYLTELTTVFQPQLINPALSPISIQALRSLLGSMTPAVVQATLSTSISAAEILSAGLMEGQIVSVLLDEMQMIVKINIPTIVTQSNALVIDFYSISSFINNQESIIQLPDRILEIGNEQWSYPAKNCKLTRHHIFCQYNEAERLSLESKLCLAGNISACVFSPIAGSYMRRFVALDGTIVANCRSLTCLCKSPSYPIYQPDHHAVTTIDLTACQTLSLDGLDFSIVSLSNITYAENLTISLSQTINTQPIDISTELSKVNASLQNAVKYIKESNHQLQSVNVNSKIGAIIVAALVLSILSIIISLLFCCWAYVATKEIRRINFKTNHINTISSSVDDLIRY

SEQ ID NO: 116 - protein, 662 aa, Canine distemper virus
MHRGIPKSSKTQTHTQQDRPPQPSTELEETRTSRARHSTTSAQRSTHYDPRTSDRPVSYTMNRTRSRKQTSHRLKNIPVHGNHEATIQHIPESVSKGARSQIERRQPNAINSGSHCTWLVLWCLGMASLFLCSKAQIHWDNLSTIGIIGTDNVHYKIMTRPSHQYLVIKLIPNASLIENCTKAELGEYEKLLNSVLEPINQALTLMTKNVKPLQSLGSGRRQRRFAGVVLAGVALGVATAAQITAGIALHQSNLNAQAIQSLRTSLEQSNKAIEEIREATQETVIAVQGVQDYVNNELVPAMQHMSCELVGQRLGLRLLRYYTELLSIFGPSLRDPISAEISIQALIYALGGEIHKILEKLGYSGSDMIAILESRGIKTKITHVDLPGKFIILSISYPTLSEVKGVIVHRLEAVSYNIGSQEWYTTVPRYIATNGYLISNFDESSCVFVSESAICSQNSLYPMSPLLQQCIRGDTSSCARTLVSGTMGNKFILSKGNIVANCASILCKCYSTSTIINQSPDKLLTFIASDTCPLVEIDGATIQVGGRQYPDMVYEGKVALGPAISLDRLDVGTNLGNALKKLDDAKVLIDSSNQILETVRRSSFNFGSLLSVPILSCTALALLLLIYCCKRRYQQTLKQHTKVDPAFKPDLTGTSKSYVRSL

SEQ ID NO: 117 - protein, 574 aa, Human respiratory syncytial virus A
MELPILKANAITTILAAVTFCFASSQNITEEFYQSTCSAVSKGYLSALRTGWYTSVITIELSNIKENKCNGTDAKVKLIKQELDKYKNAVTELQLLMQSTPAANNRARRELPRFMNYTLNNTKKTNVTLSKKRKRRFLGFLLGVGSAIASGTAVSKVLHLEGEVNKIKSALLSTNKAVVSLSNGVSVLTSKVLDLKNYIDKQLLPIVNKQSCRISNIETVIEFQQKNNRLLEITREFSVNAGVTTPVSTYMLTNSELLSLINDMPITNDQKKLMSNNVQIVRQQSYSIMSIIKEEVLAYVVQLPLYGVIDTPCWKLHTSPLCTTNTKEGSNICLTRTDRGWYCDNAGSVSFFPQAETCKVQSNRVFCDTMNSLTLPSEVNLCNVDIFNPKYDCKIMTSKTDVSSSVITSLGAIVSCYGKTKCTASNKNRGIIKTFSNGCDYASNKGVDTVSVGNTLYYVNKQEGKSLYVKGEPIINFYDPLVFPSDEFDASISQVNEKINQSLAFIRKSDELLHHVNAGKSTTNIMITTIIIVIIVILLSLIAVGLLLYCKARSTPVTLSKDQLSGINNIAFSN

SEQ ID NO: 118 - protein, 565 aa, Sendai virus
MTAYIQRSQCISTSLLVVLTTLVSCQIPRDRLSNIGVIVDEGKSLKIAGSHESRYIVLSLVPGVDLENGCGTAQVIQYKSLLNRLLIPLRDALDLQEALITVTNDTTQNAGVPQSRFFGAVIGTIALGVATSAQITAGIALAEAREAKRDIALIKESMTKTHKSIELLQNAVGEQILALKTLQDFVNDEIKPAISELGCETAALRLGIKLTQHYSGLLTAFGSNFGTIGEKSLTLQALSSLYSANITEIMTTIRTGQSNIYDVIYTEQIKGTVIDVDLERYMVTLSVKIPILSEVPGVLIHKASSISYNIDGEEWYVTVPSHILSRASFLGGADITDCVESRLTYICPRDPAQLIPDSQQKCILGDTTRCPVTKVVDSLIPKFAFVNGGVVANCIASTCTCGTGRRPISQDRSKGVVFLTHDNCGLIGVNGVELYANRRGHDATWGVQNLTVGPAIAIRPIDISLNLADATNFLQDSKAELEKARKILSEVGRWYNSRETVITIIVVMVVILVVIIVIVIVLYRLKRSMLMGNPDDRIPRDTYTLEPKIRHMYTNGGFDAMAEKR

SEQ ID NO: 119 - protein, 574 aa, Human respiratory syncytial virus A
MELPILKTNAITAILAAVTLCFASSQNITEEFYQSTCSAVSKGYLSALRTGWYTSVITIELSNIKENKCNGTDAKVKLIKQELDKYKSAVTELQLLMQSTPATNNRARRELPRFMNYTLNNTKNTNVTLSKKRKRRFLGFLLGVGSAIASGIAVSKVLHLEGEVNKIKSALLSTNKAVVSLSNGVSVLTSKVLDLKNYIDKQLLPIVNKQSCSISNIETVIEFQQKNNRLLEITREFSVNAGVTTPVSTYMLTNSELLSLINDMPITNDQKKLMSNNVQIVRQQSYSIMSIIKEEVLAYVVQLPLYGVIDTPCWKLHTSPLCTTNTKEGSNICLTRTDRGWYCDNAGSVSFFPLAETCKVQSNRVFCDTMNSLTLPSEVNLCNIDIFNPKYDCKIMTSKTDVSSSVITSLGAIVSCYGKTKCTASNKDRGIIKTFSNGCDYVSNKGVDTVSVGNTLYYVNKQEGKSLYVKGEPIINFYDPLVFPSDEFDASISQVNEKINQSLAFIRKSDELLHNVNAGKSTTNIMITTIIIVIIVILLSLIAVGLLLYCKARSTPVTLSKDQLSGINNIAFSN

SEQ ID NO: 120 - protein, 546 aa, Rinderpest virus
MRIPLAALIAMTIPCLATGQIHWGNLSKIGVVGTSSASYKVVTQSSHQSLVIKLMPNITAIDNCTKTEIGEYKRLLGTVLKPIGEALNAITKNIKPIQSSTTSRRHKRFAGVVLAGAALGVATAAQITAGIALHQSMMNSQAIESLKASLVTTNQAIEEIRQAGQEMILAVQGVQDYINNELVPAMGQLSCDMVGQKLGLKLLRYYTEILSLFGPSLRDPVSAEISIQALSYALGGDINKILNRLGYSGSDLLAILESKGIKAKITYVDIESYFIVLSIAYPSLSEIKGVIVHRLEGVSYNIGSQEWYTTVPRYVATQGYLISNFDDTPCAFTPEGTISSQNALYPMSPLLQECFRGSTRSCARTLVSGSIGNRFILSKGNLIANCASILCKCYTTGSIISQDPDKILTYIAADQCPVVEVNGVTIQVGSREYPDAVYLHNIDLGPPISLEKLDVGTDLGNAVTKLERAKDLLDSSDLILKNIKGVSVTNTGYILIGVGLIAVVGIIIVTCCCKKSSSDSRASTVVLNPGLKPDLTGTSKSYIRSL

SEQ ID NO: 121 - protein, 550 aa, Measles virus; identical to SEQ ID NO: 110

SEQ ID NO: 122 - protein, 551 aa, Human parainfluenza 2 virus
MHHLHPMIVCIFVMYTGIVGSDAIAGDQLLNIGVIQSKIRSLMYYTDGGASFIVVKLLPNLPPSNGTCNITSLDAYNVTLFKLLTPLIENLSKISTVTDTKTRQKRFAGVVVGLAALGVATAAQITAAVAIVKANANAAAINNLASSIQSTNKAVSDVIDASRTIATAVQAIQDHINGAIVNGITSASCRAHDALIGSILNLYLTELTTIFHNQITNPALTPLSIQALRILLGSTLPIVIESKLNTNLNTAELLSSGLLTGQIISISPMYMQMLIQINVPTFIMQPGAKVIDLIAISANHKLQEVVVQVPNRILEYANELQNYPANDCVVTPNSVFCRYNEGSPIPESQYQCLRGNLNSCTFTPIIGNFLKRFAFANGVLYANCKSLLCRCADPPHVVSQDDTQGISIIDIKRCSEMMLDTFSFRITSTFNATYVTDFSMINANIVHLSPLDLSNQINSINKSLKSAEDWIADSNFFANQARTAKTLYSLSAIALILSVITLVVVGLLIAYIIKLVSQIHQFRSLAATTMFHRENPAFFSKNNHGNIYGIS

SEQ ID NO: 123 - protein, 537 aa, Avian metapneumovirus
MSWKVVLLLVLLATPTGGLEESYLEESCSTVTRGYLSVLRTGWYTNVFTLEVGDVENLTCTDGPSLIRTELELTKNALEELKTVSADQLAKEARIMSPRKARFVLGAIALGVATAAAVTAGVAIAKTIRLEGEVAAIKGALRKTNEAVSTLGNGVRVLATAVNDLKDFISKKLTPAINKNKCDISDLKMAVSFGQYNRRFLNVVRQFSDNAGITPAISLDLMTDAELVRAVSNMPTSSGQINLMLENRAMVRRKGFGILIGVYGSSVVYMVQLPIFGVIDTPCWKVKAAPLCSGKDGSYACLLREDQGWYCQNAGSTVYYPNEEDCEVRSDHVFCDTAAGINVAKESEECNRNISTTKYPCKVSTGRHPISMVALSPLGALVACYDGVSCSIGSNKVGIIRPLGKGCSYISNQDADTVTIDNPVYQLSKVEGEQHTIKGKPVSSNFDPIEFPEDQFNIALDQVFESVEKSKNLIDQSNKILDSTEKGNAGFVMVIVLIVLLMLAAVGVGIFFVVKKRKAAPKFPMEMNGVNNKGFIP

SEQ ID NO: 124 - protein, 537 aa, Phocine distemper virus
MVILVHCVMGQIHWTNLSTIGIIGTDSSHYKIMTRSSHQYLVLKLMPNVSIIDNCTKAELDEYEKLLNSVLEPINQALTLMTKNVKSLQSLGSGRRQRRFAGVVIAGAALGVATAAQITAGVALYQSNLNAQAIQSLRASLEQSNKAIDEVRQASQNIIIAVQGVQDYVNNEIVPALQHMSCELIGQRLGLKLLRYYTELLSVFGPSLRDPISAEISIQALSYALGGEIHKILEKLGYSGNDMVAILETKGIRAKITHVDLSGKFIVLSISYPTLSEVKGVVVHRLEAVSYNIGSQEWYTTVPRYVATNGYLISNFDESSCVFVSESAICSQNSLYPMSPILQQCLRGETASCARTLVSGTLGNKFILSKGNIIANCASILCKCHSTSKIINQSPDKLLTFIASDTCSLVEIDGVTIQVGSRQYPDVVYASKVILGPAISLERLDVGTNLGSALKKLDDAKVLIESSDQILDTVKNSYLSLGTLIALPVSIGLGLILLLLICCCKKRYQHLFSQSTKVAPVFKPDLTGTSKSYVRSL

SEQ ID NO: 125 - protein, 565 aa, Sendai virus
MTAYIQRSQCISTSLLVVLTTLVSCQIPRDRLSNIGVIVDEGKSLKIAGSHESRYIVLSLVPGVDLENGCGTAQVIQYKSLLNRLLIPLRDALDLQEALITVTNDTTQNAGVPQSRFFGAVIGTIALGVATSAQITAGIALAEAREAKRDIALIKESMTKTHKSVELLQNAVGEQILALKTLQDFVNDEIKPAISELGCETAALRLGIKLTQHYFGLLTAFGSNFGTIGEKSRTLQALSSLYSANITEIMTTIRTGQSNIYDVIYTEQIKGTVIDVDLERYMVTLSVKIPILSEVPGVLIHKASSISYNIDGEEWYVTVPSHILSRASFLGGADITDCVESRLTYICPRDPAQLIPDSQQKCILGDTTRCPVTKVVDSLIPKFAFVNGGVVANRIASTCTCGTGRRPISQDRSKGVAFLTHDNCGLIGVNGVELYANRRGHDATWGVQNLTVGPAIAIRPVDISLNLADATNFLQDSKAELEKARKILSEVGRWYNSRETVITIIVVMVVILVVIIVIVIVLYRLKRSMLMGNPDERIPRDTYTLEPKIRHMYTNGGFDAMAEKR

SEQ ID NO: 126 - protein, 540 aa, Bovine parainfluenza 3 virus
MIITNTIIIILIISPSFCQIDITKLQRVGVLVNNPKGMKISQNFETRYLILSLIPKIENSHSCGDQQINQYKKLLDRLIIPLYDGLKLQKDVIVVSHETNNNTNSRTKRFFGEIIGTIAIGIATSAQITAAVALVEAKQAKSDIEKLKEAIRDTNKAVQSIQSSVGNLIVAVKSVQDYVNNEIVPSITRLGCEAAGLKLGIALTQHYSELTNIFGDNIGTLKEKGIKLQGIASLYHTNITEIFTTSTVDQYDIYDLLFTESIKMRVIDVDLSDYSITLQVRLPLLTKISNTQIYKVDSISYNIQGKEWYIPLPNHIMTKGAFLGGADIKECIEAFSSYICPSDPGFTLNHEIENCLSGNITQCPKTIVTSDVVPRYAFVNGGLIANCITTTCTCNGVDNRINQSPDQGIKIITHKECQVIGINGMLFSTNREGTLATYTFDDIILNNSVALNPIDISMELNKAKLELEESKEWIKKSNQKLDSVGSWYQSSATITIIIVMIVVLFIINITIIVVIIRHHRIQGKNQNDKNSEPYVLTSRQ

SEQ ID NO: 127 - protein, 550 aa, Measles virus; identical to SEQ ID NO: 110

SEQ ID NO: 128 - protein, 553 aa, Human parainfluenza 2 virus
MGSRPSTKIPAPMMLTIRVALVLSCICPANSIDGRPLAAAGIVVTGDKAVNIYTSSQTGSIIVKLLPNLPKDKEACAKAPLDAYNRTLTTLLTPLGDSIRRIQESVTTSGGGRQGRLIGAIIGGVALGVATAAQITAAAALIQAKQNAANILRLKESIAATNEAVHEVTDGLSQLAVAVGKMQQFVNDQFNKTAQELDCIKIAQQVGVELNLYLTELTTVFGPQITSPALNKLTIQALYNLAGGNMDYLLTKLGIGNNQLSSLIGSGLITGNPILYDSQTQLLGIQVTLPSVGNLNNMRATYLETLSVSTTRGFASALVPKVVTQVGSVIEELDTSYCIETDLDLYCTRIVTFPMSPGIYSCLSGNTSACMYSKTEGALTTPYMTIKGSVIANCKMTTCRCVNPPGIISQNYGEAVSLIDKQSCNVLSLGGITLRLSGEFDVTYQKNISIQDSQVIITGNLDISTELGNVNNSISNALNKLEESNRKLDKVNVKLTSTSALITYIVLTIISLVFGILSLILACYLMYKQKAQQKTLLWLGNNTLDQMRATTKM

SEQ ID NO: 129 - protein, 553 aa, Newcastle disease virus; identical to SEQ ID NO: 128

SEQ ID NO: 130 - protein, 534 aa, Measles virus
MGLRVNVSAIFMAVLLTLQTPTGQIHWGNLSKIGVVGIGSASYKVMTRSSHQSLVIKLMPNTTLLNNCTRVEIAEYRRLLRTVLEPIRDALNAMTQNIRPVQIVASSRRHKRFAGVVLAGAALGVATAAQITAGIALHQSMLNSQAIDNLRASLETTNQAIEAIRQTGQEMILAVQGVQDYINNELIPSMNQLSCDLIGQKLGLKLLRYYTEILSLFGPSLRDPISAEISIQALSYVLGGDINKVLEKLGYSGGDLLGILESRGIKARITHVDTESYFIVLSIAYPTLSEIKGVIVHRLEGVSYNIGSQEWYTTVPKYVATQGYLISNFDESSCTFMPEGTVCSQNALYPMSPLLQECLRGSTKSCARTLVSGSFGNRFILSQGNLIANCASILCKCYTTGTIINQDPDKILTHIAADHCPVVEVNGVTIQVGSRRYPDAVYLHRIDLGPPISLERLDVGTSLGSAIAKLEDAKELLESSDQILRSMKGLSSTSIVYILIAVCLGGLIGIPALICCCRGRCNKRENKLVCQDQA

SEQ ID NO: 131 - protein, 529 aa, Measles virus
MSIMGLKVNVSAIFMAVLLTLQTPTGQIHWGNLSKIGVVGIGSASYKVMTRSSHQSLVIKLMPNITLLNNCTRVEIAEYRRLLRTVLEPIRDALNAMTQNIRLVQSVASSRRHKRFAGVVLAGAALGVATAAQITAGIALHQSMLSSQAIDNLRASLETTNQAIEAIRQAGQEMILAVQGVQDYINNELIPSMNQLSCDLIGQKLGLKLLRYYTEILSLFGPSLRDPISAEISIQALSYALGGDINKVLEKLGYSGGDLLGILESRGIKARITHVDTESYFIVLSIAYPTLSEIKEVIVHRLEGVSYNIGSQEWYTTVPKYVATQGYLISNFDESSCTFMPEGTVCSQNALYPMSPLLQECLRGSTKSCARTLVSGSFGNRFILSQGNLIANCASILCKCYTTGTIIRQDPDKILTYIAADHCPVVEVNGVTIQVGSRRYPDAVDLHRIDLGPPISLERLDVGTNLGSAIAKLEDAKELLESSDQILRSMKGLSSTSIVYILIAVCLGGLIGIPALICCCRGRCNKKGE

SEQ ID NO: 132 - protein, 550 aa, Measles virus
MGLKVNVSAIFMAVLLTLQTPTGQIHWGNLSKIGVVGIGSASYKVMTRSSHQSLVIKLMPNITLLNNCTRVEIAEYRRLLRTVLEPIRDALNAMTQNIRPVQSVASSRRHKRFAGVVLAGAALGVATAAQITAGIALHQSMLNSQAIDNLRASLETTNQAIEAIRQAGQEMILAVQGVQDYINNELIPSMNQLSCDLIGQKLGLKLLRYYTEILSLFGPSLRDPISAEISIQALSYALGGDINKVLEKLGYSGGDLLGILESRGIKARITHVDTESYLIVLSIAYPTLSEIKGVIVHRLEGVSYNIGSQEWYTTVPKYVATQGYLISNFDESSCTFMPEGTVCSQNALYPMSPLLQECLRGSTKSCARTLVSGSFGNRFILSQGNLIANCASILCKCYTTGTIINQDPDKILTYIAADHCPVVEVNGVTIQVGSRRYPDAVYLHRIDLGPPILLERLDVGTNLGNAIAKLEDAKELLESSDQILRSMKGLSSTCIVYILIAVCLGGLIGIPALICCCRGRCNKKGEQVGMSRPGLKPDLTGTSKSYVRSL

SEQ ID NO: 133 - protein, 538 aa, Turkey rhinotracheitis virus
MDVRICLLLFLISNPSSCIQETYNEESCSTVTRGYKSVLRTGWYTNVFNLEIGNVENITCNDGPSLIDTELVLTKNALRELKTVSADQVAKESRLSSPRRRRFVLGAIALGVATAAAVTAGVALAKTIRLEGEVKAIKNALRNTNEAVSTLGNGVRVLATAVNDLKEFISKKLTPAINQNKCNIADIKMAISFGQNNRRFLNVVRQFSDSAGITSAVSLDLMTDDELVRAINRMPTSSGQISLMLNNRAMVRRKGFGILIGVYDGTVVYMVQLPIFGVIETPCWRVVAAPLCRKEKGNYACILREDQGWYCTNAGSTAYYPNKDDCEVRDDYVFCDTAAGINVALEVEQCNYNISTSKYPCKVSTGRHPVSMVALTPLGGLVSCYESVSCSIGSNKVGIIKQLGKGCTHIPNNEADTITIDNTVYQLSKVVGEQRTIKGAPVVNNFNPILFPEDQFNVALDQVFESIDRSQDLIDKSNDLLGADAKSKAGIAIAIVVLVILGIFFLLAVIYYCSRVRKTKPKHDYPATTGHSSMAYVS

SEQ ID NO: 134 - protein, 551 aa, Human parainfluenza 2 virus
MHHLHPMIVCIFVMYTGIVGSDAIAGDQLLNIGVIQSKIRSLMYYTDGGASFIVVKLLPNLPPSNGTCNITSLDAYNVTLFKLLTPLIENLSKISTVTDTKTRQKRFAGVVVGLAALGVATAAQITAAVAIVKANANAAAINNLASSIQSTNKAVSDVIDASRTIATAVQAIQDHINGAIVNGITSASCRAHDALIGSILNLYLTELTTIFHNQITNPALTPLSIQALRILLGSTLPIVIESKLNTNLNTAELLSSGLLTGQIISISPMYMQMLIQINVPTFIMQPGAKVIDLIAISANHKLQEVVVQVPNRILEYANELQNYPANDCVVTPNSVCCRYNEGSPIPESQYQCLRGNLNSCTFTPIIGNFLKRFAFANGVLYANCKSLLCRCADPPHVVSQDDTQGISIIDIKRCSEMMLDTFSFRITSTFNATYVTDFSMINANIVHLSPLDLSNQINSINKSLKSAEDWIADSNFFANQARTAKTLYSLSAIALILSVITLVVVGLLIAYIIKLVSQIHQFRSLAATTMFHRENPAFFSKNNHGNIYGIS

SEQ ID NO: 135 - protein, 546 aa, Hendra virus; identical to SEQ ID NO: 102

SEQ ID NO: 136 - protein, 539 aa, Human metapneumovirus
MSWKVVIIFSLLITPQHGLKESYLEESCSTITEGYLSVLRTGWYTNVFTLEVGDVENLTCSDGPSLIKTELDLTKSALRELKTVSADQLAREEQIENPRQSRFVLGAIALGVATAAAVTAGVAIAKTIRLESEVTAIKNALKTTNEAVSTLGNGVRVLATAVRELKDFVSKNLTRAINKNKCDIDDLKMAVSFSQFNRRFLNVVRQFSDNAGITPAISLDLMTDAELARAVSNMPTSAGQIKLMLENRAMVRRKGFGILIGVYGSSVIYMVQLPIFGVIDTPCWIVKAAPSCSGKKGNYACLLREDQGWYCQNAGSTVYYPNEKDCETRGDHVFCDTAAGINVAEQSKECNINISTTNYPCKVSTGRHPISMVALSPLGALVACYKGVSCSIGSNRVGIIKQLNKGCSYITNQDADTVTIDNTVYQLSKVEGEQHVIKGRPVSSSFDPIKFPEDQFNVALDQVFENIENSQALVDQSNRILSSAEKGNTGFIIVIILIAVLGSSMILVSIFIIIKKTKKPTGAPPELSGVTNNGFIPHS

SEQ ID NO: 137 - protein, 574 aa, Bovine respiratory syncytial virus
MAATAMRMIISIIFISTYMTHITLCQNITEEFYQSTCSAVSRGYLSALRTGWYTSVVTIELSKIQKNVCKSTDSKVKLIKQELERYNNAVIELQSLMQNEPASFSRAKRGIPELIHYTRNSTKRFYGLMGKKRKRRFLGFLLGIGSAIASGVAVSKVLHLEGEVNKIKNALLSTNKAVVSLSNGVSVLTSKVLDLKNYIDKELLPKVNNHDCRISNIETVIEFQQKNNRLLEIAREFSVNAGITTPLSTYMLTNSELLSLINDMPITNDQKKLMSSNVQIVRQQSYSIMSVVKEEVIAYVVQLPIYGVIDTPCWKLHTSPLCTTDNKEGSNICLTRTDRGWYCDNAGSVSFFPQAETCKVQSNRVFCDTMNSLTLPTDVNLCNTDIFNTKYDCKIMTSKTDISSSVITSIGAIVSCYGKTKCTASNKNRGIIKTFSNGCDYVSNKGVDTVSVGNTLYYVNKLEGKALYIKGEPIINYYDPLVFPSDEFDASIAQVNAKINQSLAFIRRSDELLHSVDVGKSTTNVVITTIIIVIVVVILMLIAVGLLFYCKTRSTPIMLGKDQLSGINNLSFSK

SEQ ID NO: 138 - protein, 565 aa, Sendai virus
MTAYIQRSQCISTSLLVVLTTLVSCQIPRDRLSNIGVIVDEGKSLKIAGSHESRYIVLSLVPGVDFENGCGTAQVIQYKSLLNRLLIPLRDALDLQEALITVTNDTTQNAGAPQSRFFGAVIGTIALGVATSAQITAGIALAEAREAKRDIALIKESMTKTHKSIELLQNAVGEQILALKTLQDFVNDEIKPAISELGCETAALRLGIKLTQHYSELLTAFGSNFGTIGEKSLTLQALSSLYSANITEIMTTIKTGQSNIYDVIYTEQIKGTVIDVDLERYMVTLSVKIPILSEVPGVLIHKASSISYNIDGEEWYVTVPSHILSRASFLGGADITDCVESRLTYICPRDPAQLIPDSQQKCILGDTTRCPVTKVVDSLIPKFAFVNGGVVANCIASTCTCGTGRRPISQDRSKGVVFLTHDNCGLIGVNGVELYANRRGHDATWGVQNLTVGPAIAIRPIDISLNLADATNFLQDSKAELEKARKILSEVGRWYNSRETVITIIVVMVVILVVIIVIIIVLYRLRRSMLMGNPDDRIPRDTYTLEPKIRHMYTNGGFDAMAEKR

SEQ ID NO: 139 - protein, 539 aa, Human parainfluenza 3 virus
MPTSILLIITTMIMASFCQIDITKLQHVGVLVNSPKGMKISQNFETRYLILSLIPKIEDSNSCGDQQIKQYKRLLDRLIIPLYDGLRLQKDVIVSNQESNENTDPRTKRFFGGVIGTIALGVATSAQITAAVALVEAKQARSDIEKLKEAIRDTNKAVQSVQSSIGNLIVAIKSVQDYVNKEIVPSIARLGCEAAGLQLGIALTQHYSELTNIFGDNIGSLQEKGIKLQGIASLYRTNITEIFTTSTVDKYDIYDLLFTESIKVRVIDVDLNDYSITLQVRLPLLTRLLNTQIYRVDSISYNIQNREWYIPLPSHIMTKGAFLGGADVKECIEAFSSYICPSDPGFVLNHEMESCLSGNISQCPRTVVKSDIVPRYAFVNGGVVANCITTTCTCNGIGNRINQPPDQGVKIITHKECNTIGINGMLFNTNKEGTLAFYTPNDITLNNSVALDPIDISIELNKAKSDLEESKEWIRRSNQKLDSIGNWHQSSTTIIIVLIMIIILFIINVTIIIIAVKYYRIQKRNRVDQNDKPYVLTNK

SEQ ID NO: 140 - protein, 538 aa, Mumps virus
MKAFPVICLGFAIFSSSICVNINILQQIGYIKQQVRQLSYYSQSSSSYVVVKLLPNIQPTDNSCEFKSVTQYNKTLSNLLLPIAENINNITSPSPGSRRHKRFAGIAIGIAALGVATAAQVTAAVSLVQAQTNARAIAAMKNSIQATNRAVFEVKEGTQQLAIAVQAIQDHINTIMNTQLNNMSCQILDNQLATSLGLYLTELTTVFQPQLINPALSPISIQALRSLLGSMTPAVVQATLSTSISAAEILSAGLMEGQIVSVLLDEMQMIVKINVPTIVTQSNALVIDFYSISSFINNQESIIQLPDRILEIGNEQWRYPAKNCKLTRHHIFCQYNEAERLSLETKLCLAGNISACVFSSIAGSYMRRFVALDGTIVANCRSLTCLCKSPSYPIYQPDHHAVTTIDLTSCQTLSLDGLDFSIVSLSNITYAENLTISLSQTINTQPIDISTELSKVNASLQNAVKYIKESNHQLQSVSVSSKIGAIIVAALVLSILSIIISLLFCFWAYIATKEIRRINFKTNHINTISSSVDDLIRY

SEQ ID NO: 141 - protein, 550 aa, Measles virus; identical to SEQ ID NO: 110

SEQ ID NO: 142 - protein, 555 aa, Human parainfluenza 1 virus
MQKSEILFLIYSSLLLSSSLCQIPVDKLSNVGVIINEGKLLKIAGSYESRYIVLSLVPSIDLEDGCGTTQIIQYKNLLNRLLIPLKDALDLQESLITITNDTTVTNDNPQSRFFGAVIGTIALGVATAAQITAGIALAEAREARKDIALIKDSIIKTHNSVELIQRGIGEQIIALKTLQDFVNNEIRPAIGELRCETTALKLGIKLTQHYSELATAFSSNLGTIGEKSLTLQALSSLYSANITEILSTIKKDKSDIYDIIYTEQVKGTVIDVDLEKYMVTLLVKIPILSEIPGVLIYRASSISYNIEGEEWHVAIPNYIINKASSLGGADVTNCIESRLAYICPRDPTQLIPDNQQKCILGDVSKCPVTKVINNLVPKFAFINGGVVANCIASTCTCGTNRIPVNQDRSRGVTFLTYTNCGLIGINGIELYANKRGRDTTWGNQIIKVGPAVSIRPVDISLNLASATNFLEESKIELMKAKAIISAVGGWHNTESTQIIIIIIVCILIIIICGILYYLYRVRRLLVMINSTHNSPVNTYTLESRMRNPYIGNNSN

SEQ ID NO: 143 - protein, 565 aa, Sendai virus
MATYIQRVQCISALLSVVLTTLVSCQIPRDRLSNIGVIVDEGKSLKIAGSHESRYIVLSLVPGVDLENGCGTAQVIQYKSLLNRLLIPLRDALDLQEALITVTNDTMTSADVPQSRFFGAVIGTIALGVATSAQITAGIALAEAREAKRDIALIKESMTKTHKSIELLQNAVGEQILALKTLQDFVNDEIKPAISELGCETAALRLGIKLTQHYSELLTAFGSNFGTIGEKSLTLQALSSLYSANITEIMTTIRTGQSNIYDVIYTEQIKGTVIDVDLERYMVTLSVKIPILSEVPGVLIHKASSISYNIDGEEWYVTVPSHILSRASFLGGANIADCVESRLTYICPRDPAQLIPDSQQKCILGDTTRCPVTKVVDNLIPKFAFVNGGVVANCIASTCTCGTGRRPISQDRSKGVVFLTHDNCGLIGVNGIELYANRKGHDATWGVQNLTVGPAIAIRPVDISLNLAAATDFLQDSRAELEKARKILSEVGRWYNSGATLITIIVVMIVVLVVIIVIVIVLYRLRRSMLMSNPAGRISRDTYTLEPKIRHMYTNGGFDAMTEKR

SEQ ID NO: 144 - protein, 538 aa, Mumps virus
MKAFSVTCLGFAVFSSSICVNINILQQIGYIKQQVRQLSYYSQSSSSYIVVKLLPNIQPTDNSCEFKSVTQYNKTLSNLLLPIAENINNIASPSPGSRRHKRFAGIAIGIAALGVATAAQVTAAVSLVQAQTNARAIAAMKNSIQATNRAIFEVKEGTQQLAIAVQAIQDHINTIMNTQLNNMSCQILDNQLATYLGLYLTELTTVFQPQLINPALSPISIQALRSLLGSMTPAVVQATLSTSISAAEILSAGLMEGQIVSVLLDEMQMIVKINIPTIVTQSNALVIDFYSISSFINNQESIIQLPDRILEIGNEQWSYPAKNCKLTRHHIFCQYNEAERLSLESKLCLAGNISACVFSPIAGSYMRRFVALDGTIVANCRSLTCLCKSPSYPIYQPDHHAVTTIDLTTCQTLSLDGLDFSIVSLSNITYAENLTISLSQTINTQPIDISTELSKVNASLQNAVKYIKESNHQLQSVSVNSKIGAIIVAALVLSILSIIISLLFCCWAYIATKEIRRINFKTNHINTISSSVDDLIRY

SEQ ID NO: 145 - protein, 508 aa, Infectious hematopoietic necrosis virus
MDTTITTPLILILITCGANSQTVKPDTASESDQPTWSNPLFTYPEGCTLDKLSKVNASQLRCPRIFDDENRGLIAYPTSIRSLSVGNDLGDIHTQGNHIHKVLYRTICSTGFFGGQTIEKALVEMKLSTKEAGAYDTTTAAALYFPAPRCQWYTDNVQNDLIFYYTTQKSVLRDPYTRDFLDSDFIGGKCTKSPCQTHWSNVVWMGDAGIPACDSSQEIKGHLFVDKISNRVVKATSYGHHPWGLHQACMIEFCGKQWIRTDLGDLISVEYNSGAEILSFPKCEDKTVGMRGNLDDFAYLDDLVKASESREECLEAHAEIISTNSVTPYLLSKFRSPHPGINDVYAMHKGSIYHGMCMTVAVDEVSKDRTTYRAHRATSFTKWERPFGDEWEGFHGLHGNNTTIIPDLEKYVAQYKTSMMEPMSIKSVPHPSILALYNETDVSGISIRKLDSFDLQSLHWSFWPTISALGGIPFALLLAVAACCCWSGRPPTPSASQSIPMYHLANRS

SEQ ID NO: 146 - protein, 561 aa, Drosophila melanogaster sigma virus
MAHYELHVLFVHSWMLALILITTLVWLAASQKAFTPDLVFPEMNRNSSWSVANYGEILCPTSFQSYDPKKHQILTRVLVERPSLNTDTKVEGYTCHKVKYETICDMPWYFSPTISHSISPLRVKESECKDAIAEHQLGTHVPLSFPPEDCSWNSVNTKEYEDIIVKEHPVMLDPYTNNYVDAIFPGGISSPGMGGTIHDDMMWVSKDLAVSPECSGWQRSMGLIYSSRLYGEREPMLEVGSIHIEGHRDKNLTLACRISFCGEIGVRFHDGEWMKVSVNLDHPNSVTFQVTDFPPCPPGTTIQTAVVENINPEIQELTVNMMYRLKCQETISKMVSGLPTSALDLSYLIQVQEGPGIVYKREKGILYQSVGMYQYIDTVTLNKEENQLGENSRGQKVFWTEWSDSPTRPGLQEGINGIVKYEGQVRVPLGMSLRLEAATELMWGHPVHTVSHPILHVISNHTEQSVTTWNRGVNSTNLIGLATRSISGFYDNLKLYLILALIFVSLIALVVLDVIPFKYILFVLCPPLLLCRFIKCSRRKPETRDRYHVEYNRPGQVSSAF

SEQ ID NO: 147 - protein, 508 aa, Hirame rhabdovirus
MDPRIMYYTVLLTTAARVYGQTIKPGVDSVSDQPTWANPLFTYPVDCPAAKLSKVSPSQLRCPRIFDDENRGLVAYPAVIRSLSVGNNLGDIHTQGEYVHKVLYRTTCSTGFFGGQTIEKALVEMKLAPREVGVYDTTTASALYFPAPRCQWYTDNVHNDLTFYYTTAKSVLRDPYTLGFLDSDFIEGKCSKSPCQTHWSNVVWKGDSGVAACDTGSEIKGHIFVDKTSHHVVKATSYGHHPWGLHRACMITFCGKPWIRTDLGDLIAIEYNGGATLLAFPACKDTTVGMRGSLDDFAYLDDLVKSSESREECLEAHAEIIATNSVTPYLLSKFRSPHPGINDVYAMHDGSIYHGKCMTVAIDEVSKDRRTYRAHQTSAFVAWGHPFGDEWGGFHGLHGNDTPVIPDLEKYVAQYKVSMMDKMDIRPVPHPSVQILYNDTDTADITIRKIDSFDLQSLNWSFWPSLSALGGVPILLALVFFLYCCMNRRPSMPAAPQEIPMYHLASRG

SEQ ID NO: 148 - protein, 632 aa, Sonchus yellow net virus
MSHIMNLLVISFVLAGSSWSLLGYQDDFSSKRSGALASNPTYNLPQDKGYGRDMYQPYYICEPDNDGSALTLPSWHYSCKESCMGNHLKRVVNITGARWNYVGISIPVFKIVTNEVCYTSHENVWGYCSQYQISRPVATQKSDVSCITSSMWDNDKSPIGSLYNIVNSNEAECDYFSDITDCNRDYQIFKREGKLIKRSDDSPLELSIVTDGIRTDPASEYLSLDDVSWFWKLPNNDMSPPCGWEKTQKLSCSYTDTTDVIKCNSIGYTYNIQGISKKSTCAGNIYDTDGPFPFFYDAEEALMSTDDACGKAKQGKPDADIAFIEGVNRAFEDLELTYCSATCDLFARQGTPNEDHVLDTPIGTWRYVMRDNLDPALVPCLPTSNWTISDPTTICHGKDHILVVDTATGHSGSWDTKKDYIITGEVCNTNNDEMGDDYDGMRDKILRGETIEIKFWTGDIIRMAPPYDNPEWIKGSVLFRQNPGWFSSVELNKDMIHTRDNITDLLTVMVQNATAEVMYKRLDPKTMKHILFAEIVDGVGNVSGKISGFLTGLFGGFTKAVIIVASLAICYIVLSVLWKVRLVASIFNSAKKKRVRISDILDEEPHRIQQSRPTLSRKKKTRESIQMLLNDI

SEQ ID NO: 149 - protein, 524 aa, European bat lyssavirus 1
MLLSTAIFAFFLNCAPCLAKFPIYTIPDKIGPWSPIDINHLSCPNNLIVEDEGCTTLTPFSYMELKVGYITTIKIEGFTCTGVITEAETYTNFVGYVTTTFKRKHFRPTVSACRDAYNWKITGDPRYEESLHNPYPDSHWLRTVKTTKESLLIISPSVVDMDAYDKNLYSKMFPNGKCLASPPSAICCPTNHDYTIWIPENPKPGLSCDIFTTSKGKKATKDGRLCGFVDERGLYKSLKGACKQRLCGVPGMRLMDGSWVSLQKTEAPEWCSPDQLVNVHDFHTDEIEHLVVEELVKKREECLDALETIITTKSISFRRLSHFRKLVPGFGKAYTLINKTLMEADAHYKSVREWKEVIPSKGCLMAGGRCHPHYSGIFFNGIILSPGGDVLIPEMQSALLQQHIELLESSMIPLRHPLADPSTVFKRDDEAEDFVEVHLPDTQKLISGIDLGFPEWKRYFLIGISVLALLALAIITAACCKRFKRRRRPKPNPIELIRKVSVTSQSGRAIPSWESYKVGATGES

SEQ ID NO: 150 - protein, 522 aa, Lagos bat virus
MSQLNLIPFFCVIIVLSVEDFPLYTIPEKIGPWTPIDLIHLSCPNNLQSEDEGCGTSSVFSYVELKTGYLTHQKVSGFTCTGVVNEAVTYTNFVGYVTTTFKRKHFKPTALACRDAYHWKISGDPRYEESLHTPYPDNSWLRTVTTTKESLVIISPSIVEMDVYSRTLHSPMFPTGTCSRFYPSSPSCATNHDYTLWLPDDPNLSLACDIFVTSTGKKSMNGSRMCGFTDERGYYRTIKGACKLTLCGKPGLRLFDGTWISFPRPEVTTRCLPNQLVNIHNNRIDEVEHLIVEDLIRKREECLDTLETVLMSKSISFRRLSHFRKLVPGYGKAYTILNGSLMETNVHYLKVDNWSEILPSKGCLKINNQCVAHYKGVFFNGIIKGPDGHILIPEMQSSLLKQHMDLLKAAVFPLKHPLIEPGSLFNKDGDADEFVDVHMPDVHKLVSDVDLGLPDWSLYALIGATIIAFFILICLIRICCKKGGRRNSPTNRPDLPIGLSTTPQPKSKVISSWESYKGTSNV

SEQ ID NO: 151 - protein, 533 aa, Duvenhage virus
MPLNAVIFTLLLRCSICLGKFPFYTIPDKLGPWSPIDIHHLSCPNNLVVEDEGCTTLTPFSYMELKVGYITSIKVSGFTCTGVVTEAETYTNFVGYVTTTFRRRHFRPSVNSCRDAYNWKIAGDPRYEESLHNPYPDSHWLRTVKTTKESLLIISPSVADMDAYDKKLYSKIVSNGRCSEISPGSPFCPTNHEYTIWMPESSNPGISCDIFTRSMGKKATKDGQLCGFVDERGLYKSLKGACRLRLCGISGLRLMDGSWVSLPQVNNSEWCSPDQLVNIHDFHSDEIEHLVADELVKKREDCLDALETILFTKSISFRRLSHLRKLVPGFGKAYTIINRTLMEAEAHYKSVREWKEIIPSKGCLKAGGRCYPHHNGIFFNGIILGPGGEILIPEMQSALLQQHIELLESSVVPLKHPLADPSTVFKNDDEAESFVDVHLPDTNQKISGIDLGLPEWKRYFLIGVSAVALLALSIIIAVCCKRFRKRKKSKPGPVELTRKVSVISKGNGPVPSWESYKEGTTGDVRNTTPSTRE

SEQ ID NO: 152 - protein, 525 aa, West Caucasian bat virus
MASYFALVLNGISMVFSQGLFPLYTIPDHLGPWTPIDLSHLHCPNNLYTDASYCTTEQSITYTELKVGSSVSQKIPGFTCTGVRTESVTYTNFVGYVTTTFKKKHFPPKSRDCREAYERKKAGDPRYEESLAHPYPDNSWLRTVTTTKDSWVIIEPSVVELDIYTSALYSPLFKDGTCSKSRTYSPYCPTNHDFTIWMPESENIRSACNLFSTSRGKLVRNRTSTCGIIDERGLFRSVKGACKISICGRQGIRLVDGTWMSFRYSEYLPVCSPSQLINTHDIKVDELENAIVLDLIRRREECLDTLETILMSGSVSHRRLSHFRKLVPGSGKAYSYINGTLMESDAHYIKVENWSEVIPHKGCLMVGGKCYEPVNDVYFNGIIRDSNNQILIPEMQSSLLREHVDLLKANIVPFRHPMLLRSFTSDTEEDIVEFVNPHLQDTQKLVSDMDLGLSDWKRYLLIGSLAVGGVVAILFIGTCCLRCRAGRNRRTIRSNHRSLSHDVVFHKDKDKVITSWESYKGQTAQ

SEQ ID NO: 153 - protein, 524 aa, European bat lyssavirus 2
MPFQAVLSALLSALTLCVGKFPIYTIPDKLGPWSPIDIHHLSCPNNIVVEDEGCTTLTVFSYMELKVGYITTIKVNGFTCTGVVTEAETYTNFVGYVTTTFKRKHFRPSPSACRDAYSWKTAGDPRYEESLHNPYPDSHWLRTVTTTKESVLIISPSVADMDAYDKTLYSKIFLNGKCSGVSQVSPFCSTNHDYTIWMPENPNPGVSCDIFTTSKGKKATKDGKLCGFVDERGLYKSLKGACKLKLCGISGMRLMDGSWVSIQNHDEAKWCSPDQLVNIHDFHSDEVEHLIAEELVKKREECLDALESIMTTKSISFRRLSHLRKLVPGFGKAYTIINKTLMEADAHYKSIREWTDVIPSKGCLMAGGRCYPHHNGVFFNGIILSPDGHVLIPEMQSAMLQQHIELLESSVIPLMHPLADPSTIFKKDDGAEDFVEVHLPDVQKQISGIDLGLPEWKRYFLIGVSALAFLALMIFIAACCRRVKRKKRAKPNPVELIRKVSVTSQSGRPIPSWESYKVETGGQS

SEQ ID NO: 154 - protein, 524 aa, Irkut virus
MSLLTAVIAFLFISTFCSGKFPIYTIPDKIGPWSPIDINHLSCPNNLEVEDEGCTTLTAFNYMELKVGYITSIKVDGFTCTGVVTEAETYTNFVGYVTTTFKRKHFRPNVSACRAAFSWKTAGDPRYEESLHNPYPDSHWLRTVTTTKESLLIISPSVVDMDAYDKTLYSKMFPNGKCFPPISDSPFCSTNHDYTLWLPEKEKLSMSCNIFVSSKGKKATKDGRLCGFVDERGLYKSLKGACKLKLCGMAGMRLMDGSWVSLQRADAPEWCPPGALVNVHDFHSDEIAHFVVEELIKKREECLDTLETILTTKSISFRRLSHFRKLVPGLGKAYTLINNTLMEAEAHYKSIREWKEIIPSKGCLKAGGRCHPHYDGIFFNGIILGPNGDVLIPEMQSSLLQQHIELLESSMIPLRHPLADSSAIFRSDNEAEDFVDVHLPDTQKQVSDIDLGFPEWKRYFLIGVSAIALFSLAIIIAVCCRKFKRRKRPKPGPIELVRKVSVTSQSGKVVPSWESYKEGATSQP

SEQ ID NO: 155 - protein, 531 aa, Tupaia virus
MAPQTISLLWAMVCVSVYTRANRVVAPIHEPQNWKPATVDDFTCRTGFNLDFDSKFIKTKALVLKRVGQAKVKGYLCMKNRWTTTCETNWLYSKSVSHHITHVAVSAEECYNKIRDDASGNLKIESYPNPQCAWSSTVSREEDFIHISTSDVGYDMYTDTVLSPSFPGGTCKLKTCCKTIYPNIVWVPETPAQTQVRDALFDETMVTVTVEAKKVVKDSWVTGATITPSVMEGSCKKTLGSKSGILLPNGQWFSIVETGQITIQPKGSVEEKETWVNLINDLNLSDCAETQEAKVPTAEFTVYKTESMVFNILNYHLCLETVAKARSGKNLTRLDLARLAPEIPGVAHVYQLTSDGVRVGSTRYEIIAWKPTMGLDKTLGLTIVPSGNRNSETIKWIEWTRTDDGLLNGPNGIFIADGKEIVHPNLKMVSFELETYLISEHSTQLVPHPVIHSISDEIYPENYTIGGKNSYIKIHTPTAYFWSGIHWIEGAVQKLFIVVVATALIGLFILVVWLCCGCCSKSRPVRNQKWE

SEQ ID NO: 156 - protein, 524 aa, Rabies virus; identical to SEQ ID NO: 41

SEQ ID NO: 157 - protein, 263 aa, Ovine respiratory syncytial virus
MSNHTHHFEFKTLKKAWKASKYFIVGLSCLYKLNLKSLVQMALSALAMITLVSLTITAIIYISTGNTKAKPMPTPTIQITQQFQNHTSLPPTEHNHNSTHSPTQGTTSPHTFAVDVTEGTRYYHLTLKTQGGKTKGPPTPHATRKPPISSQKSNPSEIQQDYSDFQILPYVPCNICEGDSACLSLCQDRSESILDKALTTTPKKTPKPMTTKKPTKTSTHHRTSLRNKLYIKTNMTTPPHGLISTAKHNKNQSTVQNPRHTLA

SEQ ID NO: 158 - protein, 297 aa, Human respiratory syncytial virus A
MSKTKDQRTAKTLERTWDTLNHLLFISSCLYKLNLKSIAQITLSILAMIISTSLIIAAIIFIASANHKVTLTTAIIQDATSQIKNTTQTYLTQNTQLGISFSNLSETTSQPTTTPALTTPSAKSTPQSTTVKTKNTTTTQIQPSKPTTKQRQKKPPNKPNNDFHFEVFNFVPCSICSNNPTCWAICKRIPNKKPGKKTTTKPTKKPTIKTTKKDLKPQTTKPKEVLTTKPTEKPTINTTRTNIRTTLLTTNTTGNPEYTSQKETLHSTSPEGNPSPSQVYTTSEYPSQPPSPSNTTN

SEQ ID NO: 159 - protein, 529 aa, Piry virus; identical to SEQ ID NO: 95

SEQ ID NO: 160 - protein, 298 aa, Human respiratory syncytial virus A
MSKTKDQRTAKTLEKTWDTLNHLLFISSCLYKLNLKSIAQITLSILAMIISTSLIIAAIIFIASANNKVTLTTAIIQDATSQIKNTTPTYLTQNPQLGISFFNLSGTTSQTTAILALTTPSVESILQSTTVKTKNTTTTQIQPSKPTTKQRQNKPPNKPNNDFHFEVFNFVPCSICSNNPTCWAICKRIPSKKPGKKTTTKPTKKPTIKTTKKDHKPQTTKPKEAPSTKPTEKPTINITKPNIRTTLLTNSTTGNLEHTSQEETLHSTSSEGNTSPSQVYTTSEYLSQPTSPSNITNQ

SEQ ID NO: 161 - protein, 524 aa, Rabies virus; identical to SEQ ID NO: 21

SEQ ID NO: 162 - protein, 526 aa, Australian bat lyssavirus
MLLQIVLLMSLMVFSPCPGKFPLYTIPDKLGPWSPIDIHHLSCPNNLIVEDEGCTSLSGFSYMELKVGFITTIKVSGFTCTGVVTESETYTNFFGYVTTTFKRKHFRPTPEFCRNAYNWKVAGDPRYEESLHNPYPDYHWLRTVTTTKESLLIISPSVVDMDPYDKSLHSKMFPKGTCSGASVPSIFCSTNHDYTLWMPENPKPGMSCDIFTTSKGKKASKGGKVCGFVDERGLYKSLKGACKLKLCGISGLRLMDGSWVSIQNHEEAKWCSPDQLVNIHDFHSDEIEHLIVEELVRKREECLDALESIMTTKSVSFRRLSHLRKLVPGFGKAYTIVNKTLMEADAHYKSVRTWNEIIPSKGCLKVRERCHPPYNGVFFNGIILSPDGHVLIPEMQSSLLQQHVELLESSVIPLIHPLADPSTVFKRDDEAEDFIEVHLPDVQKQVSGIDLGLSEWERYLIIGASAVVLFALAIIFAVCCRRCKRRKKARTDRIELDRKVSVTSQSGKVIPSWESYKIEAGGHFRS

SEQ ID NO: 163 - protein, 524 aa, Rabies virus; identical to SEQ ID NO: 43

SEQ ID NO: 164 - protein, 526 aa, Aravan virus
MPLQAIPLFSLILPVLVAGKFPIYTIPDKIGPWSPIDINHLSCPNNLVVEDEGCTTLTAFSYMELKVGYITTIKVSGFTCTGVVTEAETYTNFVGYVTTTFRRKHFRPTASACREAYNWKATGDPRYEESLHNPYPDSHWLRTVKTTKESLLIISPSVADMDAYDKALYSKIFPNGKCLGVSLSSPFCSTNHDYTLWMPENPKPGVSCDIFTTSKGKKATKDGKLCGFVDERGLYKSLKGACKLKLCGVMGLRLMDGSWVSLQKTEESEWCSPNQLINIHDFHSDEIEHMVVEELVKKREECLDALESIMTTKSISFRRLSHLRKLVPGFGKAYTLINKTLMEADAHYKSVREWTEVIPSKGCLKAGGGCYPHYNRVFFNGIILSPDGHVLIPEMQSALLQQHIELLESSVIPLRHPLADPSTVFKGDDEAEEFVEVHLPDTQKQISGIDLGLPEWKRYFLMGMSAIGFLALTIILAVCCRRIKRRKQSKPNPVELIRKVSVTSQSGRAIPSWESYKVKTGDQPQV

SEQ ID NO: 165 - protein, 526 aa, Sigma virus
MLALIFITTSVWLAASQKTFTPDLVFPEMNRNSSWSVANYGEILCPTSFQSYEPKKHQILTRVLVERPSLNTDTKVEGYTCHKVKYETICDMPWYFSPTISHSISPLRVKESECKDAIAEHQLGTHVSLSFPPEDCSWNSVNTKAYEDIIVKDHPVMLDPYTNNYVDAIFPGGISSPGMGGTIHDDMMWVSKDLAVSPECSGGNKVWGLFIHLGCMGGGSRCWKSAPPHRGPQGQEPHFSLPVSFYNKIGVRFHDGEWMKVSVNLDHPNSVTFQVTDFPPCPPGTTIQTAVVENINPEIQELTVNMMYRLKCQETISKMVSGLPTSVFDLSYLIQVQEGPSIVYKREKGVLYQSVGMYQYIDTVTLNTEENQLGENARGQKVFWTEWSDSPTRPDPQEGSNGFFKYEGQIRVPLGMSLRLEAATELMWGHPVHTVSHPILHVISNHTEQSVTTWNRGVNSTNLIGQATRSISGFYNDLKLYLILALIVVSIVALVVLDVIPFKYILFILCPPLLLCRFIKCSTKEA

SEQ ID NO: 166 - protein, 507 aa, Viral hemorrhagic septicemia virus
MEWNTFFLVILIIIIKSTTPQITQRPPVENISTYHADWDTPLYTHPSNCRDDSFVPIRPAQLRCPHEFEDINKGLVSVPTRIIHLPLSVTSVSAVASGHYLHRVTYRVTCSTSFFGGQTIEKTILEAKLSRQEATDEASKDHEYPFFPEPSCIWMKNNVHKDITHYYKTPKTVSVDLYSRKFLNPDFIEGVCTTSPCQTHWQGVYWVGATPKAHCPTSETLEGHLFTRTHDHRVVKAIVAGHHPWGLTMACTVTFCGTEWIKTDLGDLIQVTGPGGTRKLTPNKCVNTDIQMRGATDDFSYLNHLITNMAQRTECLDAHSDITASGKVSSFLLSKFRPSHPGPGKAHYLLDGQIMRGDCDYEAVVSINYNRAQYKTMNNTWKSWKRVDNNTDGYDGMIFGDKLIIPDIEKYQSVYDSGMLVQRNLVEVPHLSIVFVSNTSDLSTNHIHTNLIPSDWSFNWSLWPSLSGMGVVGGAFLLLVLCCCCKASPPIPNYGIPMQQFSRSQTV

SEQ ID NO: 167 - protein, 524 aa, Rabies virus; identical to SEQ ID NO: 44

SEQ ID NO: 168 - protein, 257 aa, Bovine respiratory syncytial virus
MSNHTHHLKFKTLKRAWKASKYFIVGLSCLYKFNLKSLVQTALTTLAMITLTSLVITALIYISVGNAKAKPTSKPTIQQTQRPQNHTSPLFTEHNYKSTHTSIQSTTLSQLLNIDTTRGTTYSHPTDETQNRKIKSQSTLPATRQPPINPSGSNPPENHQDHNNSQTLPYVPCSTCEGNLACSSLCQIGLERAPSRAPTITLKKAPKPKTTKKPTKTTIHHRTSPEAKLQPKNNTAAPQQGILSSPEHHTNQSTTQI

SEQ ID NO: 169 - protein, 662 aa, Tibrogargan virus
MEAITIEIIIIILTISYPILVAPQLLYNYPFNCKKGPKMTLDGLTCPLDFNTFNLDSKDNMEAGTMCRPNPLSKDIEDGFLCYKDTWVTTCEETWYFSKTVKNHIIHEHITKDECFEALATYKLGKHVEPFFPAPSCYWSATNEERATFVNIQPHGVLLDPYSGKIKDPLIDSDNCDNDFCVTRSHQTHWLRNRKPDIMERCNNETWECHPIKIYYGWVSKKKNQETSTTFNYVQTGLVIESQYIGHVLMADLCIMTFCNRDGYLFPDGSWWEIKYSLYHAFTKDHTVLNNAHKCGDRTHGDHLTEFQRDKKVGYEDLEINLEGLEMRQKSRSINMMCLNRLAEIRNTHHINVLDMSYLTPKHPGRGLAYYFSQDQKNSSKYHVKVLDCDYKLIHIHDADIKGFVNITKYPEPNVTILGLKDNLTFADLGISRCQDLTPLNGSRNISCEESSGPLHSDDSRLSNGKRFWTRHSFQGANFHEHPGVRIGVNGITYDIRKQILRFPSTSNLLWDLPSYYSTKHRVHFFQHPTKHEIRKNFTGSDSRDIDVLDDLINRHINRTDFPTRIRNWIGNIEDKVEHFFSNVGGTIKTIISLVLFVIGTLISIKVWKKCKRHPQKTKKVAQLKLNDYEKTYNQRDTSNNNNDDLYETIENGGTVYSPFHV

SEQ ID NO: 170 - protein, 508 aa, Infectious hematopoietic necrosis virus
MDTMITTPLILILITCGANSQTVKPDTASESDQPTWSNPLFTYPEGCTLDKLSKVNASQLRCPRIFDDENRGLIAYPTSIRSLSVGNDLGEIHTQGNHIHKVLYRTICSTGFFGGQTIEKALVEMKLSTKEAGAYDTTTAAALYFPAPRCQWYTDNVQNDLIFYYTTQKSVLRDPYTRDFLDSDFIGGKCTKSPCQTHWSNVVWMGDAGIPACDSSQEIKAHLFVDKISNRVVKATSYGHHPWGLHRACMIEFCGKQWIRTDLGDLISVEYNSGAEILSFPKCEDKTMGMRGNLDDFAYLDDLVKASESREECLEAHAEIISTNSVTPYLLSKFRSPHPGINDVYAMHKGSIYHGMCMTVAVDEVSKDRTTYRAHRATSFTKWERPFGDEWEGFHGLHGNNTTIIPDLEKYVAQYKTSMMEPMSIKSVPHPSILAFYNETDLSGISIRKLDSFDLQSLHWSFWPTISALGGIPLVLLLAVAACCCWSGRPPTPSAPQSIPMYHLANRS

SEQ ID NO: 171 - protein, 292 aa, Human respiratory syncytial virus B
MSKHKNQRTARTLEKTWDTLNHLIVISSCLYRLNLKSIAQIALSVLAMIISTSLIIAAIIFIISANHKVTLTTVTVQTIKNHTEKNISTYLTQVPPERVNSSKQPTTTSPIHTNSATISPNTKSETHHTTAQTKGRITTSTQTNKPSTKSRSKNPPKKPKDDYHFEVFNFVPCSICGNNQLCKSICKTIPSNKPKKKPTIKPTNKPTTKTTNKRDPKTPAKMPKKEIITNPAKKPTLKTTERDTSISQSTVLDTITPKYTIQQQSLHSTTSENTPSSTQIPTASEPSTLNPN

SEQ ID NO: 172 - protein, 660 aa, Adelaide River virus
MATFKVLVLMILWITSIFNVRCEKFVTIPVNCSGEVDIDKMDVMCPNRYNLLSTNHLMEGEEVETFCRPSLRENDLLDGYLCRKQKWEVTCTETWYFVTDVKYQIIEVIPTENECMEERERKLKGEYIPPYYPPTNCVWNAIDTQERTFITLIEHPVIEDPVTMTLMDSKFTKPCNPKHNEVTICDTYNPLIKWISKETSGLNLHCQIKSWECIPVKLHHSHRNMMEALYLESPDFGIVDASKICNLTFCGYNGILLDNGEWWSIYRSGFTHGFLDNHILKNRRIEECKEKKPGYKLAKLDTTYIDLEFEIELEHEKCLGTLEKLQNGEYVTPLDLSYLSPSNPGKHYAYRLEYINTTEHKCVQLGFTYEGGDCRKMLDERDDHGAYYNWTTIKLQRVIRAVCYYHTFSMNLDESKHKYYDQDNRSIQIDEKFISEVLKSTPLIDRHEKYEGNLSWNGIIIESKNGHEKNVIVPSASQYNHVMINKILKRLDTVMYDSYKFDSESGSISYNKIVPIVREDNLQNAHRVDVIQYIKDKGSYIINGFTGWFSSLGKLMRWTIWGVGLFFSIFTLYKIIMILRKHSNDNVRKEFKETAGKVMIGQPIDTKSMSRTSIKANNKGKFDKVKDLFTPRSKTISHLTTDTLKEHTDGTYEELHFFNV

SEQ ID NO: 173 - protein, 525 aa, Australian bat lyssavirus
MLLQVILLVSLTAILPCTGQFPLYAIPDKLGPWSPIDIHHLSCPNNLIVEDEGCTSLSGFSYMELKVGFITTIKVSGFTCTGVVTESETYTNFFGYVTTTFKRKHFRPTPESCRKAYNWKIAGDPRYEESLHNPYPDYHWLRTVTTTKESLLIISPSVVDMDPYDKSLHSRMFPKGSCSGASIPSVFCSTNHDYTLWMPEDSNSGMSCDIFTMSKGKKASKGGKVCGFVDERGLYKSLKGACKLKLCGISGLRLLDGSWVSIQNHEEVKWCSPNQLVNIHDFNADEIEHLIVEELIKEREECLDALESIITTKSVSFRRLSHLRKLVPGFGKAYTIINKTLMEADAHYKSVRTWDEIIPSKGCLKVREKCHPPYNGVFFNGIILGPDGQVLIPEMQSSLLHQHTELLESSVIPLIHPLADPSTIFRGDDEAEGFIEVHLPDIQKQVSGIDLGLSEWERYLIIGISAIILFILAIIFTICCRRCKRRKKIRTDHIELDRKVSVTSQSGKSIPSWESYKSRQGHSRS

SEQ ID NO: 174 - protein, 623 aa, Bovine ephemeral fever virus
MFKVLIITLLVNKIHLEKIYNVPVNCGELHPVKAHEIKCPQRLNELSLQAHHNLAKDEHYNKICRPQLKDDAHLEGFICRKQRWITKCSETWYFSTSIEYQILEVIPEYSGCTDAVKKLDQGALIPPYYPPAGCFWNTEMNQEIEFYVLIQHKPFLNPYDNLIYDSRFLTPCTINDSKTKGCPLKDITGTWIPDVRVEEISEHCNNKHWECITVKSFRSELNDKERLWEAPDIGLVHVNKGCLSTFCGKNGIIFEDGEWWSIENQTESDFQNFKIEKCKGKKPGFRMHTDRTEFEELDIKAELEHERCLNTISKILNKENINTLDMSYLAPTRPGRDYAYLFEQTSWQEKLCLSLPDSGRVSKDCNIDWRTSTRGGMVKKNHYGIGSYKRAWCEYRPFVDKNEDGYIDIQELNGHNMSGNHAILETAPAGGSSGNRLNVTLNGMIFVEPTKLYLHTKSLYEGIEDYQKLIKFEVMEYDNVEENLIRYEEDEKFKPVNLNPHEKSQINRTDIVREIQKGGKKVLSAVVGWFTSTAKAVRWTIWAVGAIVTTYAIYKLYKMVKSNSSHSKHREADLEGLQSTTKENMRVEKNDKNYQDLELGLYEEIRSIKGGSKQTGDDRFFDH

SEQ ID NO: 175 - protein, 523 aa, Isfahan virus; identical to SEQ ID NO: 88

SEQ ID NO: 176 - protein, 524 aa, Rabies virus; identical to SEQ ID NO: 50

SEQ ID NO: 177 - protein, 512 aa, Snakehead rhabdovirus
MTLPNMKPKRIVLFLVFLNAWVSNAQVTHKPRPDSIVEYSEEWENPIYTTPSHCFEDTFAPVKPEKLRCPHIFDDQNLGLTASKAKILHMDLKPEDTHFEAKGRLLHKVTYQVLCSTGFFGGRTVTRKVLETPMGDNEAQAYKAVDREFPYFPEPLCFWLRDNVAAERVFHFSTPKTVTVDLYSRKYISPDFVGGQCAKSPCPTHWPNVYWVGETQSPECPSIDTEGGHIFTKKDTHRITKAVVHGHHPWGLTKACQIQFCNEQWIRTDLGDLIRIEPNDGTSSLTLPKCQDNVVQMRGNLDDFSYLNHAIVNMAQRSECLEAHSSIVAQQKVSPYLLSKFRPPHPGLGKAHYLQNNTIMRGDCIYEGVAEISENRTTYRNLKGEWKKWSLSRGGEGYDGMTVGTKIVIPDLEKYQSIYDNGMFIPKLLGEVPHPSIVITYNQTDSIETGIFTDGKLLNMGVNWTLWPSLSGISLFTVASLILIWYCCCRVTPQALNYSIPMHTITSRGVEI

SEQ ID NO: 178 - protein, 508 aa, Infectious hematopoietic necrosis virus
MDTMITTPLILILITCGANSQTVKPDTASESDQPTWSNPLFTYPEGCTLDKLSKVNASQLRCPRIFDDENRGLIAYPTSIRSLSVGNDLGDIHTQGNHIHKVLYRTICSTGFFGGQTIEKALVKMKLSTKEAGAYDTTTAAALYFPAPRCQWYTDNVQNDLIFYYTTQKSVLRDPYTRDFLDSDFIGGKCTKSPCQTHWSNVVWMGDAGIPACDSSQEIKAHLFVDKISNRVVKATSYGHHPWGLHQACMIEFCGQQWIRTDLGDLISVVYNSGSEILSFPKCEDKTVGMRGNLDDFAYLDDLVKASESREECLEAHAEIISTNSVTPYLLSKFRSPHPGINDVYAMHKGSIYHGMCMTVAVDEVSKDRTTYRAHRATSFTKWERPFGDEWEGFHGLHGNNTTIIPDLEKYVAQYKMSMMEPMSIKSVPHPSILALYNETDVSGISIRKLDSFDLQSLHWSFWPTISALGGIPFVLLLAVAACCCWSGRPPTPSVPQSIPMYHLANRS

SEQ ID NO: 179 - protein, 676 aa, Zaire ebolavirus
MGVTGILQLPRDRFKRTSFFLWVIILFQRTFSIPLGVIHNSTLQVSDVDKLVCRDKLSSTNQLRSVGLNLEGNGVATDVPSATKRWGFRSGVPPKVVNYEAGEWAENCYNLEIKKPDGSECLPAAPDGIRGFPRCRYVHKVSGTGPCAGDFAFHKEGAFFLYDRLASTVIYRGTTFAEGVVAFLILPQAKKDFFSSHPLREPVNATEDPSSGYYSTTIRYQATGFGTNETEYLFEVDNLTYVQLESRFTPQFLLQLNETIYTSGKRSNTTGKLIWKVNPEIDTTIGEWAFWETKKNLTRKIRSEELSFTAVSNRAKNISGQSPARTSSDPGTNTTTEDHKIMASENSSAMVQVHSQGREAAVSHLTTLATISTSPQPPTTKPGPDNSTHNTPVYKLDISEATQVEQHHRRTDNDSTASDTPPATTAAGPLKAENTNTSKGTDLLDPATTTSPQNHSETAGNNNTHHQDTGEESASSGKLGLITNTIAGVAGLITGGRRARREAIVNAQPKCNPNLHYWTTQDEGAAIGLAWIPYFGPAAEGIYTEGLMHNQDGLICGLRQLANETTQALQLFLRATTELRTFSILNRKAIDFLLQRWGGTCHILGPDCCIEPHDWTKNITDKIDQIIHDFVDKTLPDQGDNDNWWTGWRQWIPAGIGVTGVIIAVIALFCICKFVF

SEQ ID NO: 180 - protein, 372 aa, Sudan ebolavirus
MEGLSLLQLPRDKFRKSSFFVWVIILFQKAFSMPLGVVTNSTLEVTEIDQLVCKDHLASTDQLKSVGLNLEGSGVSTDIPSATKRWGFRSGVPPQVVSYEAGEWAENCYNLEIKKPDGSECLPPPPDGVRGFPRCRYVHKAQGTGPCPGDYAFHKDGAFFLYDRLASTVIYRGVNFAEGVIAFLILAKPKETFLQSPPIREAANYTENTSSYYATSYLEYEIENFGAQHSTTLFKINNNTFVLLDRPHTPQFLFQLNDTIQLHQQLSNTTGKLIWTLDANINADIGEWAFWENKKISPNNYVEKSCLSKLYRSTRQKTMMRHRRELQREESPTGPPGSIRTWFQRIPLGWFHCTYQKGKQHCRLRIRQKVEE

SEQ ID NO: 181 - protein, 365 aa, Tai Forest ebolavirus
MGASGILQLPRERFRKTSFFVWVIILFHKVFSIPLGVVHNNTLQVSDIDKFVCRDKLSSTSQLKSVGLNLEGNGVATDVPTATKRWGFRAGVPPKVVNYEAGEWAENCYNLAIKKVDGSECLPEAPEGVRDFPRCRYVHKVSGTGPCPGGLAFHKEGAFFLYDRLASTIIYRGTTFAEGVIAFLILPKARKDFFQSPPLHEPANMTTDPSSYYHTTTINYVVDNFGTNTTEFLFQVDHLTYVQLEARFTPQFLVLLNETIYSDNRRSNTTGKLIWKINPTVDTSMGEWAFWENKKTSQKPFQVKSCLSYLYQKPRTRSLTRQRRSLLPSPPTTTQAKTTKNWFQRIPLQWFRCKTSRERTQCQPQ

SEQ ID NO: 182 - protein, 677 aa, Reston ebolavirus
MGSGYQLLQLPRERFRKTSFLVWVIILFQRAISMPLGIVTNSTLKATEIDQLVCRDKLSSTSQLKSVGLNLEGNGIATDVPSATKRWGFRSGVPPKVVSYEAGEWAENCYNLEIKKSDGSECLPLPPDGVRGFPRCRYVHKVQGTGPCPGDLAFHKNGAFFLYDRLASTVIYRGTTFAEGVIAFLILSEPKKHFWKATPAHEPVNTTDDSTSYYMTLTLSYEMSNFGGEESNTLFKVDNHTYVQLDRPHTPQFLVQLNETLRRNNRLSNSTGRLTWTVDPKIEPDVGEWAFWETKKNFSQQLHGENLHFQILSTHTNNSSDQSPAGTVQGKISYHPPTNNSELVPTDSPPVVSVLTAGRTEEMSTQGLTNGETITGFTANPMTTTIAPSPTMTSEVDNNVPSEQPNNTASIEDSPPSASNETIDHSEMNSIQGSNNSAQSPQTKATPAPTASPMTLDPQETANISKPGTSPGSAAGPSQPGLTINTISKVADSLSPTRKQKRSVRQNTANKCNPDLHYWTAVDEGAAAGLAWIPYFGPAAEGIYIEGVMHNQNGLICGLRQLANETTQALQLFLRATTELRTYSLLNRKAIDFLLQRWGGTCRILGPSCCIEPHDWTKNITDEINQIKHDFIDNPLPDHGDDLNLWTGWRQWIPAGIGIIGVIIAIIALLCICKILC

SEQ ID NO: 183 - protein, 681 aa, Lake Victoria marburgvirus
MKTTCLLISLILIQGVKTLPILEIASNIQPQNVDSVCSGTLQKTEDVHLMGFTLSGQKVADSPLEASKRWAFRAGVPPKNVEYTEGEEAKTCYNISVTDPSGKSLLLDPPTNIRDYPKCKTIHHIQGQNPHAQGIALHLWGAFFLYDRIASTTMYRGKVFTEGNIAAMIVNKTVHKMIFSRQGQGYRHMNLTSTNKYWTSSNGTQTNDTGCFGTLQEYNSTKNQTCAPSKKPLPLPTAHPEVKLTSTSTDATKLNTTDPNSDDEDLTTSGSGSGEQEPYTTSDAATKQGLSSTMPPTPSPQPSTPQQGGNNTNHSQGVVTEPGKTNTTAQPSMPPHNTTTISTNNTSKHNLSTPSVPIQNATNYNTQSTAPENEQTSAPSKTTLLPTENPTTAKSTNSTKSPTTTVPNTTNKYSTSPSPTPNSTAQHLVYFRRKRNILWREGDMFPFLDGLINAPIDFDPVPNTKTIFDESSSSGASAEEDQHASPNISLTLSYFPKVNENTAHSGENENDCDAELRIWSVQEDDLAAGLSWIPFFGPGIEGLYTAGLIKNQNNLVCRLRRLANQTAKSLELLLRVTTEERTFSLINRHAIDFLLARWGGTCKVLGPDCCIGIEDLSRNISEQIDQIKKDEQKEGTGWGLGGKWWTSDWGVLTNLGILLLLSIAVLIALSCICRIFTKYIG

SEQ ID NO: 184 - protein, 676 aa, Zaire ebolavirus
MGVTGILQLPRDRFKRTSFFLWVIILFQRTFSIPLGVIHNSTLQVNDVDKLVCRDKLSSTNQLRSVGLNLEGNGVATDVPSATKRWGFRSGVPPKVVNYEAGEWAENCYNLEIKKPDGSECLPAAPDGIRGFPRCRYVHKVSGTGPCAGDFAFHKEGAFFLYDRLASTVIYRGTTFAEGVVAFLILPQAKKDFFSSHPLREPVNATEDPSSGYYSTTIRYQATGFGTNETEYLFEVDNLTYVQLESRFTPQFLLQLNETIYTSGKRSNTTGKLIWKVNPEIDTTIGEWAFWETKKNLTRKIRSEELSFTVVSNGAKNISGQSPARTSSDPGTNTTTEDHKIMASENSSAMVQVHSQGREAAVSHLTTLATISTSPQSLTTKPGPDNSTHNTPVYKLDISEATQVEQHHRRTDNDSTASDTPSATTAAGPPKAENTNTSKSTDFLDPATTTSPQNHSETAGNNNTHHQDTGEESASSGKLGLITNTIAGVAGLITGGRRTRREAIVNAQPKCNPNLHYWTTQDEGAAIGLAWIPYFGPAAEGIYTEGLMHNQNGLICGLRQLANETTQALQLFLRATTELRTFSILNRKAIDFLLQRWGGTCHILGPDCCIEPHDWTKNITDKIDQIIHDFVDKTLPDQGDNDNWWTGWRQWIPAGIGVTGVIIAVIALFCICKFVF

SEQ ID NO: 185 - protein, 677 aa, Reston ebolavirus
MGSGYQLLQLPRERFRKTSFLVWVIILFQRAISMPLGIVTNSTLKATEIDQLVCRDKLSSTSQLKSVGLNLEGNGIATDVPSATKRWGFRSGVPPKVVSYEAGEWAENCYNLEIKKSDGSECLPLPPDGVRGFPRCRYVHKVQGTGPCPGDLAFHKNGAFFLYDRLASTVIYRGTTFAEGVVAFLILSEPKKHFWKATPAHEPVNTTDDSTSYYMTLTLSYEMSNFGGNESNTLFKVDNHTYVQLDRPHTPQFLVQLNETLRRNNRLSNSTGRLTWTLDPKIEPDVGEWAFWETKKNFSQQLHGENLHFQILSTHTNNSSDQSPAGTVQGKISYHPPANNSELVPTDSPPVVSVLTAGRTEEMSTQGLTNGETITGFTANPMTTTIAPSPTMTSEVDNNVPSEQPNNTASIEDSPPSASNETIYHSEMDPIQGSNNSAQSPQTKTTPAPTTSPMTQDPQETANSSKPGTSPGSAAGPSQPGLTINTVSKVADSLSPTRKQKRSVRQNTANKCNPDLYYWTAVDEGAAVGLAWIPYFGPAAEGIYIEGVMHNQNGLICGLRQLANETTQALQLFLRATTELRTYSLLNRKAIDFLLQRWGGTCRILGPSCCIEPHDWTKNITDEINQIKHDFIDNPLPDHGDDLNLWTGWRQWIPAGIGIIGVIIAIIALLCICKILC

SEQ ID NO: 186 - protein, 676 aa, Tai Forest ebolavirus
MGASGILQLPRERFRKTSFFVWVIILFHKVFSIPLGVVHNNTLQVSDIDKFVCRDKLSSTSQLKSVGLNLEGNGVATDVPTATKRWGFRAGVPPKVVNYEAGEWAENCYNLAIKKVDGSECLPEAPEGVRDFPRCRYVHKVSGTGPCPGGLAFHKEGAFFLYDRLASTIIYRGTTFAEGVIAFLILPKARKDFFQSPPLHEPANMTTDPSSYYHTTTINYVVDNFGTNTTEFLFQVDHLTYVQLEARFTPQFLVLLNETIYSDNRRSNTTGKLIWKINPTVDTSMGEWAFWENKKNFTKTLSSEELSFVPVPETQNQVLDTTATVSPPISAHNHAGEDHKELVSEDSTPVVQMQNIKGKDTMPTTVTGVPTTTPSPFPINARNTDHTKSFIGLEGPQEDHSTTQPAKTTSQPTNSTESTTLNPTSEPSSRGTGPSSPTVPNTTESHAELGKTTPTTLPEQHTAASAIPRAVHPDELSGPGFLTNTIRGVTNLLTGSRRKRRDVTPNTQPKCNPNLHYWTALDEGAAIGLAWIPYFGPAAEGIYTEGIMENQNGLICGLRQLANETTQALQLFLRATTELRTFSILNRKAIDFLLQRWGGTCHILGPDCCIEPQDWTKNITDKIDQIIHDFVDNNLPNQNDGSNWWTGWKQWVPAGIGITGVIIAIIALLCICKFML

SEQ ID NO: 187 - protein, 681 aa, Lake Victoria marburgvirus
MRTTCLFISLILIQGIKTLPILEIASNDQPQNVDSVCSGTLQKTEDVHLMGFTLSGQKVADSPLEASKRWAFRTGVPPKNVEYTEGEEAKTCYNISVTDPSGKSLLLDPPTNVRDYPKCKTIHHIQGQNPHAQGIALHLWGAFFLYDRIASTTMYRGKVFTEGNIAAMIVNKTVHKMIFSRQGQGYRHMNLTSTNKYWTSSNGTQTNDTGCFGTLHEYNSTKNQTCAPSKTPPPPPTARPEIKPTSTPTDATRLNTTNPNSDDEDLTTSGSGSGEQELYTTSDAVTKQGLSSTMPPTPSPQPGTPQQGGNNTNHSQDATTELDNTNTTAQPPTPSHNTTTISTNNTSKHNLSTLSAPPQNTTNPNTQSMATENEKTSAPPKATLPPTENPTTEKSTNNTKSPTTMEPNTTNGHFTSPSSTPNSTTQHLIYFRRKRSILWREGDMFPFLDGLINAPIDFDPVPNTKTIFDESSSSGASTEEDQHASSNISLTLSYLPHTSGNTAYSGENENDCDAELRIWSVQEDDLAAGLSWIPFFGPGIEGLYTAGLIKNQNNLVCRLRRLANQTAKSLELLLRVTTEERTFSLINRHAIDFLLTRWGGTCKVLGPDCCIGIEDLSRNISEQIDQIKKDEQKEGTGWGLGGKWWTSDWGVLTNLGILLLLSIAVLIALSCICRIFTKYIG

SEQ ID NO: 188 - protein, 364 aa, Zaire ebolavirus
MGVTGILQLPRDRFKRTSFFLWVIILFQRTFSIPLGVIHNSTLQVSDVDKLVCRDKLSSTNQLRSVGLNLEGNGVATDVPSATKRWGFRSGVPPKVVNYEAGEWAENCYNLEIKKPDGSECLPAAPDGIRGFPRCRYVHKVSGTGPCAGDFAFHKEGAFFLYDRLASTVIYRGTTFAEGVVAFLILPQAKKDFFSSHPLREPVNATEDPSSGYYSTTIRYQATGFGTNETEYLFEVDNLTYVQLESRFTPQFLLQLNETIYTSGKRSNTTGKLIWKVNPEIDTTIGEWAFWETKKTSLEKFAVKSCLSQLYQTEPKTSVVRVRRELLPTQGPTQQLKTTKSWLQKIPLQWFKCTVKEGKLQCRI

SEQ ID NO: 189 - protein, 681 aa, Lake Victoria marburgvirus
MKTTCLFISLILIQGIKTLPILEIASNNQPQNVDSVCSGTLQKTEDVHLMGFTLSGQKVADSPLEASKRWAFRTGVPPKNVEYTEGEEAKTCYNISVTDPSGKSLLLDPPTNIRDYPKCKTIHHIQGQNPHAQGIALHLWGAFFLYDRIASTTMYRGRVFTEGNIAAMIVNKTVHKMIFSRQGQGYRHMNLTSTNKYWTSNNGTQTNDTGCFGALQEYNSTKNQTCAPSKIPSPLPTARPEIKPTSTPTDATTLNTTDPNNDDEDLITSGSGSGEQEPYTTSDAVTKQGLSSTMPPTPSPQPSTPQQEGNNTDHSQGTVTEPNKTNTTAQPSMPPHNTTAISTNNTSKNNFSTLSVSLQNTTNYDTQSTATENEQTSAPSKTTLPPTGNLTTAKSTNNTKGPTTTAPNMTNGHLTSPSPTPNPTTQHLVYFRKKRSILWREGDMFPFLDGLINAPIDFDPVPNTKTIFDESSSSGASAEEDQHASPNISLTLSYFPNINENTAYSGENENDCDAELRIWSVQEDDLAAGLSWIPFFGPGIEGLYTAGLIKNQNNLVCRLRRLANQTAKSLELLLRVTTEERTFSLINRHAIDFLLTRWGGTCKVLGPDCCIGIEDLSRNISEQIDQIKKDEQKEGTGWGLGGKWWTSDWGVLTNLGILLLLSIAVLIALSCICRIFTKYIG

SEQ ID NO: 190 - protein, 676 aa, Sudan ebolavirus
MEGLSLLQLPRDKFRKSSFFVWVIILFQKAFSMPLGVVTNSTLEVTEIDQLVCKDHLASTDQLKSVGLNLEGSGVSTDIPSATKRWGFRSGVPPQVVSYEAGEWAENCYNLEIKKPDGSECLPPPPDGVRGFPRCRYVHKAQGTGPCPGDYAFHKDGAFFLYDRLASTVIYRGVNFAEGVIAFLILAKPKETFLQSPPIREAANYTENTSSYYATSYLEYEIENFGAQHSTTLFKINNNTFVLLDRPHTPQFLFQLNDTIQLHQQLSNTTGKLIWTLDANINADIGEWAFWENKKNLSEQLRGEELSFETLSLNETEDDDATSSRTTKGRISDRATRKYSDLVPKDSPGMVSLHVPEGETTLPSQNSTEGRRVDVNTQETITETTATIIGTNGNNMQISTIGTGLSSSQILSSSPTMAPSPETQTSTTYTPKLPVMTTEESTTPPRNSPGSTTEAPTLTTPENITTAVKTVWPQESTSNGLITSTVTGILGSLGLRKRSRRQVNTRATGKCNPNLHYWTAQEQHNAAGIAWIPYFGPGAEGIYTEGLMHNQNALVCGLRQLANETTQALQLFLRATTELRTYTILNRKAIDFLLRRWGGTCRILGPDCCIEPHDWTKNITDKINQIIHDFIDNPLPNQDNDDNWWTGWRQWIPAGIGITGIIIAIIALLCVCKLLC

SEQ ID NO: 191 - protein, 367 aa, Reston ebolavirus
MGSGYQLLQLPRERFRKTSFLVWVIILFQRAISMPLGIVTNSTLKATEIDQLVCRDKLSSTSQLKSVGLNLEGNGIATDVPSATKRWGFRSGVPPKVVSYEAGEWAENCYNLEIKKSDGSECLPLPPDGVRGFPRCRYVHKVQGTGPCPGDLAFHKNGAFFLYDRLASTVIYRGTTFAEGVVAFLILSEPKKHFWKATPAHEPVNTTDDSTSYYMTLTLSYEMSNFGGNESNTLFKVDNHTYVQLDRPHTPQFLVQLNETLRRNNRLSNSTGRLTWTLDPKIEPDVGEWAFWETKKTFPNNFMEKTCISKFYQPTPTTPQIRARRELSKEKLATTHPPTTPSWFQRIPLQWFQCSLQDGQRKCRPKV

SEQ ID NO: 192 - protein, 319 aa, Sudan ebolavirus
MGGLSLLQLPRDKFRKSSFFVWVIILFQKAFSMPLGVVTNSTLEVTEIDQLVCKDHLASTDQLKSVGLNLEGSGVSTDIPSATKRWGFRSGVPPKVVSYEAGEWAENCYNLEIKKPDGSECLPPPPDGVRGFPRCRYVHKAQGTGPCPGDYAFHKDGAFFLYDRLASTVIYRGVNFAEGVIAFLILAKPKETFLQSPPIREAVNYTENTSSYYATSYLEYEIENFGAQHSTTLFKIDNNTFVRLDRPHTPQFLFQLNDTIHLHQQLSNTTGRLIWTLDANINADIGEWAFWENKKKSLRTTTWRRAVFRSFIAQRDRRR

SEQ ID NO: 193 - protein, 676 aa, Zaire ebolavirus
MGVTGILQLPRDRFKRTSFFLWVIILFQRTFSIPLGVIHNSTLQVSDVDKLVCRDKLSSTNQLRSVGLNLEGNGVATDVPSATKRWGFRSGVPPKVVNYEAGEWAENCYNLEIKKPDGSECLPAAPDGIRGFPRCRYVHKVSGTGPCAGDFAFHKEGAFFLYDRLASTVIYRGTTFAEGVVAFLILPQAKKDFFSSHPLREPVNATEDPSSGYYSTTIRYQATGFGTNETEYLFEVDNLTYVQLESRFTPQFLLQLNETRYTSGKRSNTTGKLIWKVNPEIDTTIGEWAFWETKKNLTRKIRSEELSFTAVSNRAKNISGQSPARTSSDPGTNTTTEDHKIMASENSSAMVQVHSQGREAAVSHLTTLATISTSLRPPITKPGPDNSTHNTPVYKLDISEATQVEQHHRRTDNASTTSDTPPATTAAGPLKAENTNTSKGTDLLDPATTTSPQNHSETAGNNNTHHQDTGEESASSGKLGLITNTIAGVAGLITGGRRTRREAIVNAQPKCNPNLHYWTTQDEGAAIGLAWIPYFGPAAEGIYIEGLMHNQDGLICGLRQLANETTQALQLFLRATTELRTFSILNRKAIDFLLQRWGGTCHILGPDCCIEPHDWTKNITDKIDQIIHDFVDKTLPDQGDNDNWWTGWRQWIPAGIGVTGVIIAVIALFCICKFVF

SEQ ID NO: 194 - protein, 332 aa, Reston ebolavirus
MGSGYQLLQLPRERFRKTSFLVWVIILFQRAISMPLGIVTNSTLKATEIDQLVCRDKLSSTSQLKSVGLNLEGNGIATDVPSATKRWGFRSGVPPKVVSYEAGEWAENCYNLEIKKSDGSECLPLPPDGVRGFPRCRYVHKVQGTGPCPGDLAFHKNGAFFLYDRLASTVIYRGTTFAEGVVAFLILSEPKKHFWKATPAHEPVNTTDDSTSYYMTLTLSYEMSNFGGNESNTLFKVDNHTYVQLDRPHTPQFLVQLNETLRRNNRLSNSTGRLTWTLDPKIEPDVGEWAFWETKKKLFPTTSWRKLAFPNSINPHQQLLRSEPGGNCPRKN

SEQ ID NO: 195 - protein, 568 aa, Simian virus 41
MSGAEGNTNKRTFRAVFRTLIILITLTILALSAAILYEVTHTSNGSESNNQVFDPTDTLNAITGNIKSMIALLNQILYNAAIALPLKIDSTESVLLAAIKDLQFSNPASQNCSSGGNLLNDALYINGINQYLLSNSFAGTVGLGPLLNIPSFIPSATAPGGCTRIPSFSLTKTHWCYSHNVILAGCADSKASNQYLAMGIVEQSSADFPFFRTMRTLYLSDGINRKSCSIVAIPGGCALYCYVATKTEQEDYAATTPSELRLTFYYYNETLVERTLTIPNVTGNWATLNPAVGSGVYHLGYLAFPVYGGLIQNSAAWNSQFGSYFLPQNPAVQCSGSAEQQINTAKGSYVVNWFSGRLIQSAVLVCPLSDQLTDQCRVVLFNNSETMMGAEGRLYTIGGDLYYYQRSSSWWTASLLYKINTDFSQGLPPLIEAQWVPTYLVPRPGAQPCSAGNFCPANCITGVYADVWPMNNPFPAGSSGVNPNYLFGGAFLWADVARVNPTFYMASATQYKNTTGFPNSNQKAAYTSTTCFQNTGSKKIYCLFIIEMGSSLMGEFQIVPFLREVIIT

SEQ ID NO: 196 - protein, 616 aa, Newcastle disease virus
MDRAVSQVALENDEREAKNTWRLVFRIAILLLTVVTLAISAAALAYSMEASTPSDLVGIPTAISRTEEKITSALGSNQDVVDRIYKQVALESPLALLNTESTIMNAITSLSYQINGAANSSGCGAPIHDPDYIGGIGKELIVDDASDVTSFYPSAFQEHLNFIPAPTTGSGCTRIPSFDMSATHYCYTHNVILSGCRDRSHSHQYLALGVLRTSATGRVFFSTLRSINLDDTQNRKSCSVSATPLGCDMLCSKVTETEEEDYNSAIPTSMVHGRLGFDGQYHEKDLDVTTLFEDWVANYPGVGGGSFIDNRVWFPVYGGLKPNSPSDTAQEGKYVIYKRYNDTCPDEQDYQIRMAKSSYKPGRFGGKRVQQAILSIKVSTSLGEDPVLTVPPNTVTLMGAEGRVLTVGTSHFFYQRGSSYFSPALLYPMTVSNKTATLHSPYTFNAFTRPGSVPCQASARCPNSCVTGVYTDPYPLVFYRNHTLRGVFGTMLDDEQARLNPVSAVFDSISRSRITRVSSSSTKAAYTTSTCFKVVKTNKTYCLSIAEISNTLFGEFRIVPLLVEILKDDGVREARSGRLSQLQEGWKDDIVSPIFCDAKNQTEYRRELESYAASWP

SEQ ID NO: 197 - protein, 645 aa, Xenotropic MuLV-related virus
MESPAFSKPLKDKINPWGPLIIMGILVRAGASVQRDSPHQVFNVTWKITNLMTGQTANATSLLGTMTDTFPKLYFDLCDLVGDNWDDPEPDIGDGCRSPGGRKRTRLYDFYVCPGHTVLTGCGGPREGYCGKWGCETTGQAYWKPSSSWDLISLKRGNTPKGQGPCFDSSVGSGSIQGATPGGRCNPLVLEFTDAGKRASWDAPKTWGLRLYRSTGADPVTLFSLTRQVLNVGPRVPIGPNPVITEQLPPSQPVQIMLPRPPRPPPSGAASMVPGAPPPSQQPGTGDRLLNLVEGAYQALNLTSPDKTQECWLCLVSGPPYYEGVAVLGTYSNHTSAPANCSVTSQHKLTLSEVTGQGLCIGAVPKTHQALCNTTQKTSDGSYYLASPAGTIWACSTGLTPCLSTTVLNLTTDYCVLVELWPKVTYHSPNYVYGQFEKKTKYKREPVSLTLALLLGGLTMGGIAAGVGTGTTALVATKQFEQLQAAIHTDLGALEKSVSALEKSLTSLSEVVLQNRRGLDLLFLKEGGLCAALKEECCFYADHTGVVRDSMAKLRERLNQRQKLFESGQGWFEGLFNRSPWFTTLISTIMGPLIVLLLILLFGPCILNRLVQFVKDRISVVQALVLTQQYHQLKSIDPEEVESRE

SEQ ID NO: 198 - protein, 645 aa, Xenotropic MuLV-related virus
MESPAFSKPLKDKINPWGPLIIMGILVRAGASVQRDSPHQVFNVTWKITNLMTGQTANATSLLGTMTDTFPKLYFDLCDLVGDNWDDPEPDIGDGCRSPGGRKRTRLYDFYVCPGHTVLTGCGGPREGYCGKWGCETTGQAYWKPSSSWDLISLKRGNTPKGQGPCFDSSVGSGSIQGATPGGRCNPLVLEFTDAGKRASWDAPKTWGLRLYRSTGADPVTLFSLTRQVLNVGPRVPIGPNPVITEQLPPSQPVQIMLPRTPRPPPSGAASMVPGAPPPSQQPGTGDRLLNLVEGAYLALNLTSPDKTQECWLCLVSGPPYYEGVAVLGTYSNHTSAPANCSVTSQHKLTLSEVTGQGLCIGAVPKTHQALCNTTQKTSDGSYYLASPAGTIWACSTGLTPCLSTTVLNLTTDYCVLVELWPKVTYHSPNYVYGQFEKKTKYKREPVSLTLALLLGGLTMGGIAAGVGTGTTALVATKQFEQLQAAIHTDLGALEKSVSALEKSLTSLSEVVLQNRRGLDLLFLKEGGLCAALKEECCFYADHTGVVRDSMAKLRERLNQRQKLFESGQGWFEGLFNRSPWFTTLISTIMGPLIVLLLILLFGPCILNRLVQFVKDRISVVQALVLTQQYHQLKSIDPEEVESRE

SEQ ID NO: 199 - protein, 885 aa, Simian immunodeficiency virus
MGCLGNQLLIALLLVSVLEICCVQYVTVFYGVPAWKNATIPLFCATKNRDTWGTTQCLPDNDDYSELAINVTEAFDAWDNTVTEQAIEDVWNLFETSIKPCVKLTPLCIAMRCNKTETDRWGLTGNAGTTTTAITTTATPSVAENVINESNPCIKNNSCAGLEQEPMIGCKFNMTGLNRDKKKEYNETWYSRDLICEQSANESESKCYMHHCNTSVIQESCDKHYWDAIRFRYCAPPGYALLRCNDSNYLGFAPNCSKVVVSSCTRMMETQTSTWFGFNGTRAENRTYIYWHGKSNRTIISLNKYYNLTMRCRRPENKTVLPVTIMSGLVFHSQPINERPKQAWCWFEGSWKKAIQEVKETLVKHPRYTGTNDTRKINLTAPAGGDPEVTFMWTNCRGEFLYCKMNWFLNWVEDRDQKGGRWKQQNRKEQQKKNYVPCHIRQIINTWHKVGKNVYLPPREGDLTCNSTVTSLIAEIDWINSNETNITMSAEVAELYRLELGDYKLIEITPIGLAPTSVRRYTTTGASRNKRGVFVLGFLGFLATAGSAMGAASVTLSAQSRTLLAGIVQQQQQLLDVVKRQQELLRLTVWGTKNLQTRVTAIEKYLKDQAQLNSWGCAFRQVCHTTVPWPNETLVPNWNNMTWQEWERQVDFLEANITQLLEEAQIQQEKNMYELQKLNSWDIFGNWFDLTSWIRYIQYGVLIVLGVIGLRIVIYVVQMLARLRQGYRPVFSSPPAYVQQIPIHKGQEPPTKEGEEGDGGDRGGSRSWPWQIEYIHFLIRQLIRLLTWLFSSCRDWLLRSYQILQPVLQSLSTTLQRVREVIRIEIAYLQYGWRYFQEAVQAWWKLARETLASAWGDIWETLGRVGRGILAIPRRIRQGLELTLL

SEQ ID NO: 200 - protein, 881 aa, Simian immunodeficiency virus
  VARIANT (736)..(736): Xaa can be any naturally occurring amino acid
MGCLGNQLLIAILLLSVYGIYCTQYVTVFYGVPAWRNATIPLFCATKNRDTWGTTQCLPDNGDYSELALNVTESFDAWENTVTEQAIEDVWQLFETSIKPCVKLSPLCITMRCNKSETDRWGLTKSSTTITTAAPTSAPVSEKIDMVNETSSCIAQNNCTGLEQEQMISCKFTMTGLKRDKTKEYNETWYSTDLVCEQGNSTDNESRCYMNHCNTSVIQESCDKHYWDTIRFRYCAPPGYALLRCNDTNYSGFMPKCSKVVVSSCTRMMETQTSTWFGFNGTRAENRTYIYWHGRDNRTIISLNKYYNLTMKCRRPGNKTVLPVTIMSGLVFHSQPINDRPKQAWCWFGGKWKDAIKEVKQTIVKHPRYTGTNNTDKINLTAPGGGDPEVTFMWTNCRGEFLYCKMNWFLNWVEDRDVTTQRPKERHRRNYVPCHIRQIINTWHKVGKNVYLPPREGDLTCNSTVTSLIANIDWTDGNQTSITMSAEVAELYRLELGDYKLVEITPIGLAPTDVKRYTTGGTSRNKRGVFVLGFLGFLATAGSAMGAASLTLTAQSRTLLAGIVQQQQQLLDVVKRQQELLRLTVWGTKNLQTRVTAIEKYLKDQAQLNAWGCAFRQVCHTTVPWPNASLTPDWNNDTWQEWERKVDFLEENITALLEEAQIQQEKNMYELQKLNSWDVFGNWFDLASWIKYIQYGIYVVVGVILLRIVIYIVQMLAKLRQGYRPVFSSPPSYFQXTHTQQDPALPTREGKEGDGGEGGGNSSWPWQIEYIHFLIRQLIRLLTWLFSNCRTLLSRAYQILQPILQRLSATLRRVREVLRTELTYLQYGWSYFHEAVQAGWRSATETLAGAWRDLWETLRRGGRWILAIPRRIRQGLELTLL

SEQ ID NO: 201 - protein, 821 aa, Simian immunodeficiency virus
MSTGNVYQELIRRYLVVVKKLYEGKYEVSRSFSYTMFSLLVGIIGKQYVTVFYGVPVWKEAKTHLICATDNSSLWVTTNCIPSLPDYDEVEIPDIKENFTGLIRENQIVYQAWHAMGSMLDTILKPCVKINPYCVKMQCQETENVSATTAKPITTPTTTSTVASSTEIYLDVDKNNTEEKVERNHVCRYNITGLCRDSKEEIVTNFRGDDVKCENNTCYMNHCNESVNTEDCQKGLLIRCILGCVPPGYVMLRYNEKLNNNKLCSNISAVQCTQHLVATVSSFFGFNGTMHKEGELIPIDDKYRGPEEFHQRKFVYKVPGKYGLKIECHRKGNRSVVSTPSATGLLFYHGLEPGKNLKKGMCTFKGRWGLALWSLAKELNKLNDSIKVNQTCKNFTSTGEENKQNTDKQKEFAKCIKTLKIDNYTTSGDRAAEMMMMTCQGEMFFCNVTRIMRAWNDPNEKKWYPYASCQIRQIVDDWMQVGRKIYLPPTSGFNNHIRCTHRVTEMYFEMQKIDSNETKMQIKFLPPSETSNQFVAYGAHYKLVKIMPIGIAPTDVKRHTLPEHHKEKRGAVILGILGLLSLAGSAMGSVSVALTVQSQSLVTGIVEQQKQLLKLIEQQSELLKLTIWGVKNLQTRLTSLENYIKDQALLSQWGCSWAQVCHTSVEWTNTSITPNWTSETWKEWETRTDYLQQNITEMLKQAYDREQRNTYELQKLGDLTSWASWFDFTWWVQYLKWGVFLVLGIIGLRILLALWNTISRFRQGYRPVFSQDCQQNLYRKRPDNGEEESNSLELGEHNSENLKEESLNRSLIEDLTSFARE

SEQ ID NO: 202 - protein, 882 aa, Simian immunodeficiency virus
  VARIANT (737)..(737): Xaa can be any naturally occurring amino acid
MGCLGNQLLIAILLLSVYGIYCIQYVTVFYGVPAWRNATIPLFCATKNRDTWGTTQCLPDNDDYSELALNVTESFDAWENTVTEQAIEDVWQLFETSIKPCVKLSPLCITMRCNKSETDKWGLTKSSTTTASTTTTTTAKSVETRDIVNETSPCVVHDNCTGLEQEPMISCKFNMTGLKRDKKKEYNETWYSADLVCEQGNSTGNESRCYMNHCNTSVIQECCDKDYWDAIRCRYCAPPGYALLRCNDTNYSGFMPNCSKVVVSSCTRMMETQTSTWFRFNGTRAENRTYIYWHGRDNRTIISLNKHYNLTMKCRRPGNKTVLPVTIMSALVFHSQPVNERPKQAWCRFGGNWKEAIKEVKQTIVKHPRYTGTNNTDKINLTAPRGGDPEVTFMWTNCRGEFLYCKMNWFLNWVEDRSLTTQKPKERHKRNYVPCHIRQIINTWHKVGKNVYLPPREGDLTCNSTVTSLIANINWTDGNQTSITMSAEVAELYRLELGDYKLVEITPIGLAPTNVKRYTTGGTSRNKRGVFVLGFLGFLATAGSAMGAASLTVTAQSRTLLAGIVQQQQQLLDVVKRQQELLRLTVWGTKNLQTRVSAIEKYLKDQAQLNAWGCAFRQVCHTTVPWPNASLTPDWNNETWQEWERKVDFLEANITALLEEAQIQQEKNMYELQKLNSWDVFGNWFDLTSWIKYIQYGIYIIVGVILLRIVIYIVQMLARLRQGYRPVFSSPPSYFQXTHTQQDPALPTKEGKKGDGGGSGGNSSWPWQIEYIHFLIRQLIRLLTWLFSNCRTLLSRAYQILQPIFQRLSATLRRIREVLRLELTYLQYGWSYFQEAVQAAQRSATETLAGAWGELWEALQRGGRWILAIPRRIRQGLELTLL

SEQ ID NO: 203 - protein, 880 aa, Simian immunodeficiency virus
MKAMETQRNCRTLSLKEIILCTLVLGIIGIIKCEDNMWVTVYYGVPVWREADTTLFCASDAKAQNPEVHNVWASQACVSTNPNPEEIELTNVTEYFNAWENNMVEQMHEDIVNLWDQSVKPCVKLIPLCVTLNCSLFKCIKENGNTTNCTVQISTGNDSTANNITVGTIDMYNCSFNATTELRDRKKQVYSLFYRQDLEPLEGNKPPEGDKNALYRLYNCNTTAMTQACSKVSLEPIPIHYCAPAGFALLKCNDKNFTGIGQCKNVSTVHCTHGIRPVVSTQFLLNGTLEEKVTVLDRNVSNDMDTIIVKLNETVRLNCTRTGNNTIKGIPIGPSQIFYGIETVIGDTRQAFCQLNKTVWTNTFKKVRHALNETYKGYLGNETITFGPSTGGDLEVTNLHLICGGEFFYCNTSILFNTSIIFNETKDDNITIPCRIRQIVRLWQRVGRGIFLPPIRGTINCISNITGILFAQQKTDRMNKSAMFTPVGGEMRNNWRSELYKYKVVRIEPLGVAPTKAKRRTVHREKRAAVGLGALFLGFLGAAGSTMGAASLTLTVQARQLLSGIVQQQSNLLRAIEAQQHLLQLSVWGIKQLQARVLAVERYLKDQQLLGLWGCSGKLICTTSVPWNTTWTNKSYDDIWYNMTWMQWDKEVSNYTDVIYNLLEKAQTQQENNEKELLELDKWASLWNWFDITSWLWYIKIFIIIVGGLIGLRIVFALLSIVNRVRQGYSPLSFQTLIPARRDRDRPEEIEEGGGEPDNVRSIRLVSGFLALAWNDLRDLCLFLYHRLRDLLLIVLRTLELVGQTLLKGLRRGREALIHLRGILQYWGQELKTSAISLLDTTAIAVAEGTDRIIEIAQRFGRGILNIPRRIRQGLERALL

SEQ ID NO: 204 - protein, 835 aa, Simian immunodeficiency virus
MKVTEMQKNWLICCLLIGLIKIIGSELWVTVYYGVPVWRDAETVLFCASDAKAHSTEAHNIWATQACVPTDPNPQEVLIPNVTERFDMWKNNMVDQMQEDIISLWEQSLKPCVKLTPLCVTLSCSSWRSVNNSVNQTNHVQMQNCSFNVTTELRDKKKQVYSLFYMGDIIPLDTNNSSGNNSQYRLINCNTTAVTQACPKISFEPIPIYYCAPPGFAIIKCNDQDFNGTGECNNVSTVQCTHGIKPVISTQLILNGSLATSNIVIRNNSKDTLLVQLNESIPINCTRPGNKTRGQVQIGPGMTFYNIENIIGDTRQAYCEVNRTWEQIWNTTKQIIINNRKNITFIPNPGGDLEVTNLMINCGGEFFYCNTSQLFTNQNGNTTGNITLQCRIRQIVNLWTRVGKGIYAPPIKGPINCLSNITGIILDYTKSGTEKYTIYPTGGDMTNLWRQELYKYKVVSIEPIGVAPGKAKRHTVTRQKRAAFGLGALFLGFLGAAGSTMGAASITLTVQARKLLSGIVQQQNNLLRAIEAQQHLLQLSVWGIKQLQARVLAIERYLRDQQILGLWGCSGKSVCYTNVPWNTTWSNNNSYDTIWGNMTWQNWDEQVRNYSGVIFGLLEQAQEQQSINEKSLLELDQWSSLWNWFDITKWLWYIKIFIMVVAGIVGIRIISIIMSMVARVRQGYSPLSLQTLIPTTRGPDRPERTEEDAGELDNGRSVRLVSGFLALAWEDFRNLLLFLYHRLTDCLSILRRTLELLRQNIHKGLQLLNELRIYLWGIIAYWGRELKISAINLLDTTAVAVAEGTDRIIELVQRIGRGILHIPRRIRQGLERALL

SEQ ID NO: 205 - protein, 855 aa, Feline immunodeficiency virus
MAEGFAVNRQWIGPEEAEELLDFDIATQMNEEGPLNPGINLFRVPGITETEKQEYCNILQPKLQDLRNEIQEVKLEEGNAGKFRRARFLRYSDETILSLIHLFIGYCTYLCKRNKLGTLVHNIDIEAPQEECYSNRERGTTVNIKYSRRCCIGTTALYLLLLTGIIIYTQTTQAQVVWRLPPLVVPVEESEIIFWDCWAPEEPACQDFLGAMIYLKASTNISIQEGPTLGNWAREIWGTLFKKATRQCRRGRIWRRWNETITGPSGCANNTCYNISVIVPDYQCYLDRVDTWLQGKVNISLCLTGGKMLYNKDTKQLSYCTDPLQIPLINYTFGPNQTCMWNTSQIQDSDIPKCGWWNQIAYYNSCRWEQTDVKFHCQRTQSQPGTWLRTISSWKQKNRWEWRPDFESEKVRVSLQCNTTKNLTFAMRSSGDYGEVTGAWIEFGCHRNKSKLHSDARFRIRCRWNVGDNTSLIDTCGNDPNVSGANPVDCTMYANRMYNCSLQNGFTMKVDDLIMHFNMTKAVEMYNIAGNWSCTSDLPSTWGYMNCNCTNSSSTDSNKMACPKRQGILRNWYNPVAGLRQSLEKYQVVKQPDYLVVPREVMEYKPRRKRAAIHVMLALATVLSMAGAGTGATAIGMVTQYHQVLATHQETIEKITEALKVNNLRLVTLEHQVLVIGLKVEAIEKFLYTAFAMQELGCNQNQFFCKVPPELWQRYNMTINQTIWNHGNITLGEWYNQTKDLQQKFYEIIMDMEQNNVQGRKGLQQLQEWEDWVGWLGNIPRYLKGLLGGILGIGLGVLLLILCLPTLVDCIRNCISKVLGYTVIAMPEVEEEEIQPPMELRRNGRQCDMSEKEEE

SEQ ID NO: 206 - protein, 854 aa, Feline immunodeficiency virus
MAEGFAANRQWIGPEEAEELLDFDKATQMNEEGPLNPGVNPFRVPAVTEADKQEYCKILQPRLQEIRNEIQEVKLEEGNAGKFRRARFLRYSDESILSLIHLFIGYCTYLVNRRRLGSLRHDINIEAPQEEQYSSREQGTTENIKYGRRCLIGTASLYLLLFIGVAIYLGTTNAQIVWRLPPLVVPVEESEIIFWDCWAPEEPACQDFLGAMIHLKASTNISIQEGPTLGNWAREIWGTLFKKATRHCRRNKIWKRWNETITGPVGCANNTCYNISVIIPDYQCYLDRVDTWLQGKVNISLCLTGGKMLYNRDTKQLSYCTDPLQIPLINYTFGPNQTCMWNTSQIQDPEIPKCGWWNQIAYYNSCRWESTNVKFYCQRTQSQPGTWIRTISSWRQKNRWEWRPDFESEKVKISLQCNSTHNLTFAMRSSGDYGEVMGAWIEFGCHRNKSRFHTEARFRIRCRWNVGDNTSLIDTCGKNLNVSGANPVDCTMYANKMYNCSLQNGFTMKVDDLIMHFNMTKAVEMYNIAGNWSCKSDLPQNWGYMNCNCTNGTSNDNKMACPEDKGILRNWYNPVAGLRQALEKYQVVKQPEYIVVPTEVMTYKYKQKRAAIHIMLALATVLSIAGAGTGATAIGMVTQYQQVLATHQEALDKITEALKINNLRLVTLEHQMLVIGLKVEAIEKFLYTAFAMQELGCNQNQFFCEIPKELWLRYNMTLNQTIWNHGNITLGEWYNQTKYLQQKFYEIIMDIEQNNVQGKQGLQKLQNWQDWMGWIGKIPQYLKGLLGGILGIGLGILLLILCLPTLVDCIRNCISKVLGYTVIAMPEIDDEEETVQMELRKNGRQCGMSEKEEE

SEQ ID NO: 207 - protein, 854 aa, Feline immunodeficiency virus
MAEGFAANRQWIGPEEAEELLDFDIAIQMNEEGPLNPGVNPFRVPGITEAEKQEYCNILQPKLQDLKGKIQEVKLEEGNAGKFRRARFLRYSDETVLSLIHLFIGYCPHLCRRHELGSLRHDIDIEALQEERYNDREKGITDNIKYGKRCLIGTAVLYLLLSLGIIIHTCKAQVVWRLPPLVVPVEESEIIFWDCWAPEEPACQDFLGAMIHLKASTNISIQEGPTLGNWAREIWGTLFKKATRQCRRGRIWRRWNETITGPLGCANNTCYNISVIVPDYQCYLDRVDTWLQGKVNISLCLTGGKMLYNKETKQLSYCTDPLQIPLINYTFGPNQTCMWNTSQIQDPEIPKCGWWNQNAYYNSCRWEHTDVQFQCQRTQSQPGSWIRAISSWKQRNRWEWRPDFESEKVKVSLQCNSTKNLTFAMRSSGDYGEVTGAWIEFGCHRTKSKYHTEARFRIRCRWNVGDNTSLIDTCGETQNVSRANPVDCTMYANRMYNCSLQNGFTMKVDDLIMHFNKTKAVEMYNIAGNWSCKSDLPPTWGYMNCNCTNSTNSGTGIRMACPRNQGILRNWYNPVAGLRQSLEKYQVVKQPDYLVVPGEVMEYKPRRKRAAIHVMLALATVLSMAGAGTGATAIGMVTQYQQVLATHQEAIEKVTEALKINNLRLVTLEHQVLVIGLKVEAMEKFLYTAFAMQELGCNQNQFFCKVPSALWERYNMTINQTIWNHGNITLGEWYNQTKDLQQRFYEIIMDIEQNNVQGKKGLQQLQEWEDWVGWIGNIPQYLKGLLGGILGIGLGMLLLILCLPTLVDCIRNCIHKILGYTVIAMPEVEEEEIQPQMELRRNGRQCGMSEKEEE

SEQ ID NO: 208 - protein, 856 aa, Feline immunodeficiency virus
MAEGFAANRQWIGPEEAEELLDFDIATQMSEEGPLNPGVNPFRVPGITEKEKQNYCNILQPKLQDLRNEIQEVKLEEGNAGKFRRARFLRYSDERVLSLVHAFIGYCIYLGNRNKLGSLRHDIDIEAPQEECYNNREKGTTDNIKYGRRCCLGTVTLYLILFTGVIVYSQTAGAQVVWRLPPLVVPVEESEIIFWDCWAPEEPACQDFLGAMIHLKAKTNISIREGPTLGNWAREIWATLFKKATRQCRRGRIWKRWNETITGPSGCANNTCYNVSVIVPDYQCYLDRVDTWLQGKINISLCLTGGKMLYNKVTKQLSYCTDPLQIPLINYTFGPNQTCMWNTSQIQDPEIPKCGWWNQMAYYNSCKWEEAKVKFHCQRTQSQPGSWFRAISSWKQRNRWEWRPDFKSKKVKISLPCNSTKNLTFAMRSSGDYGEVTGAWIEFGCHRNKSNLHTEARFRIRCRWNVGSDTSLIDTCGNTPNVSGANPVDCTMYSNKMYNCSLQNGFTMKVDDLIVHFNMTKAVEMYNIAGNWSCTSDLPSSWGYMNCNCTNSSSSYSGTKMACPSNRGILRNWYNPVAGLRQSLEQYQVVKQPDYLLVPEEVMEYKPRRKRAAIHVMLALATVLSIAGAGTGATAIGMVTQYHQVLATHQEAIEKVTGALKINNLRLVTLEHQVLVIGLKVEAMEKFLYTAFAMQELGCNQNQFFCKIPLELWTRYNMTINQTIWNHGNITLGEWYNQTKDLQQKFYEIIMDIEQNNVQGKTGIQQLQKWEDWVRWIGNIPQYLKGLLGGILGIGLGVLLLILCLPTLVDCIRNCIHKILGYTVIAMPEVEGEEIQPQMELRRNGRQCGMSEKEEE

SEQ ID NO: 209 - protein, 855 aa, Feline immunodeficiency virus
MAEGFAANRQWIGPEEAEELLDFDIATQMNEEGPLNPGINPFRVPGITETEKQDYCNMLQPKLQALRNEIQEVKLEEGNAGKFRRARFLRYSDETILSLIHLFIGYCTYLLNRKELGSLRHDIDIEAPQEECYSSREQSITDNIKYGKRCFIGTAGLYLLLFIGVGIYLGTAKAQVVWRLPPLVVPVEESEIIFWDCWAPEEPACQDFLGAMIHLKASTNISIQEGPTLGNWAKEIWGTLFKKATRQCRRGRIWKRWNETITGPLGCANNTCYNISVIVPDYQCYLDRVDTWLQGKVNVSLCLTGGKILYNKYTKQLSYCTDPLQIPLISYTFGPNQTCMWDTSQIQDPEIPKCGWWNQIAYYNSCRWESTDVKFHCQRTQSQPGLWLRAISSWKQRNRWEWRPDFESEKAKVSLQCNSTKNLTFAMRSSGDYGEVTGAWIEFGCHRNKSKLHTEARFRIRCRWNVGDNTSLIDTCGETQNVSGANPVDCTMYANRMYNCSLQNGFTMKVDDLIMHFNMTKAVEMYDIAGNWSCTSDLPPTWGYMNCNCTNSSSTNSVKMACPKNQGILRNWYNPVAGLRQSLEKYQVVKQPDYLVVPGEVMEYKPRRKRAAIHVMLALATVLSMAGAGTGATAIGMVTQYHQVLATHQETIEKVTEALKINNLRLVTLEHQVLVIGLKVEAMEKFLYTAFAMQELGCNQNQFFCKVPPELWKRYNMTINQTIWNHGNITLGEWYNQTKELQQKFYEIIMNIEQNNVQVKKGLQQLQEWEDWVGWIGNIPQYLKGLLGGILGIGIGVLLLILCLPTLVDCIRNCISKVLGYTVIAMPEIGDEEETVQMELRKNGRQCGMSEKEEE

SEQ ID NO: 210 - protein, 856 aa, Feline immunodeficiency virus
MAEGFVANGQWIGPEEAEELVDFEIATQMNEEGPLNPGINPFRVPGITKQEKQEYCSTMQPKLQALRNEIQEVKLEEGNAGKFRRARFLRYSDETILSLIYLFIGYFRYLVDRKRFGSLRHDIDIEAPQEECYNNKEKGMTENIKYGKRCLVGTAALYLILAIGIIIIIRTTDAQVVWRLPPLVVPVEESEIIFWDCWAPEEPACQDFLGAMIHLKASTNISNTEGPTLGNWAREIWATLFKKATRQCRRGRIWKRWNETITGPIGCANNTCYNISVIVPDYQCYIDRVDTWLQGKVNISLCLTGGKMLYNKETKQLSYCTDPLQIPLINYTFGPNQTCMWNISQIQDPEIPKCGWWNQQAYYNNCKWERTDVKFQCQRTQSQPGSWIRAISSWKQGNRWEWRPDFESERVKVSLQCNSTRNLTFAMRSSGDYGEITGAWIEFGCHRNKSIRHNAARFRIRCRWNEGDNNSLIDTCGETQNVSGANPVDCTMYANKMYNCSLQDGFTMKVDDLIMHFNMTKAVEMYNIAGNWSCMSDLPTEWGYMNCNCTNDTSNNNTRKMKCPKENGILRNWYNPVAGLRQSLEKYQVVKQPDYLLVPEEVMEYKPRRKRAAIHVMLALATVLSMAGAGTGATAIGMVTQYHQVLATQQEAIEKVTEALKITNLRLVTLEHQVLVIGLKVEAMEKFLYTAFAMQELGCNQNQFFCKVPPELWRRYNMTINQTIWNHGNITLGEWYNQTKDLQKKFYGIIMDIEQNNVQGKKGLQQLQKWEDWVGWIGNIPQYLKGLLGSIVGIGLGILLLILCLPTLVDCIRNCIHKILGYTVIAMPEVDGEEIQPQMELRRNGRQCGMSEKEEE

SEQ ID NO: 211 - protein, 575 aa, Mayoro Virus
EGRAHGWPHEIIEYYYGLHPTTTIVVVVAVSVVVLLSVAASVYMCVVARNKCLTPYALTPGAVVPVTIGVLCCAPKAHAASFAEGMAYLWDNNQSMFWMELTGPLALLILTTCCARSLLSCCKGSFLVAVSVGSAVASAYEHTAVIPNQVGFPYKAHVAREGYSPLTLQMQVVETSLEPTLNLEYITCDYKTKVPSPYVKCCGTAECRTQDKPEYKCAVFTGVYPFMWGGAYCFCDSENTQMSEAYVERADVCKHDYAAAYRAHTASLRAKIKVTYGTVNQTVEAYVNGDHAVTLAGTKFIFGPVSTAWTPFDTKIVVYKGEVYNQDFPPYGAGQPGRFGDIQSRTLDSKDLYANTGLKLARPAAGNIHVPYTQTPSGFKTWQKDRDSPLNAKAPFGCTIQTNPVRAMNCAVGNIPVSMDIADSAFTRLTDAPIISELLCTVSTCTHSSDFGGVAVLSYKVEKAGRCDVHSHSNVAVLQEVSIEAEGRSVIHFSTASAAPSFIVSVCSSRATCTAKCEPPKDHVVTYPANHNGITLPDLSSTAMTWAQHLAGGVGLLIALAVLILVIVTCITLRR

SEQ ID NO: 212 - protein, 1239 aa, Barmah Forest Virus
MDFIPTQTFYGRRWRPAPVQRYIPQPQPPAPPRRRRGPSQLQQLVAALGALALQPKQKQKRAQKKPKKTPPPKPKKTQKPKKPTQKKKSKPGKRMRNCMKIENDCIFPVMLDGKVNGYACLVGDKVMKPAHVKGTIDNPELAKLTFKKSSKYDLECAQVPVCMKSDASKFTHEKPEGHYNWHHGAVQFSNGRFTIPTGSGKPGDSGRPIFDNTGKVVAIVLGGANEGARTALSVVTWNKDMVTRITPEESVEWSAAALNITALCVLQNLSFPCDAPPCAPCCYEKDPAGTLRLLSDHYYHPKYYELLDSTMHCPQGRRPKRSVAHFEAYKATRPYIGWCADCGLAGSCPSPVSIEHVWSDADDGVLKIQVSMQIGIAKSNTINHAKIRYMGANGVQEAERSTLSVSTTAPCDILATMGHFILARCRPGSQVEVSLSTDPKLLCRTPFSHKPRFIGNEKSPAPTGHKTRIPCKTYSHQTDLTREEITMHVPPDVPIQGLVSNTGKSYSLDPKTKTIKYKCTCGETVKEGTATNKITLFNCDTAPKCITYAVDNTVWQYNSQYVPRSEVTEVKGKIHVPFPLTDSTCAVSVAPEPQVTYRLGEVEFHFHPMYPTLFSIRSLGKDPSHSQEWIDTPMSKTIQVGAEGVEYVWGNNNPVRLWAQKSSSSSAHGNPISIVSHYYDLYPYWTITVLASLGLLIVISSGFSCFLCSVARTKCLTPYQLAPGAQLPTFIALLCCAKSARADTLDDFSYLWTNNQAMFWLQLASPVAAFLCLSYCCRNLACCMKIFLGISGLCVIATQAYEHSTTMPNQVGIPFKALIERPGYAGLPLSLVVIKSELVPSLVQDYITCNYKTVVPSPYIKCCGGAECSHKNEADYKCSVFTGVYPFMWGGAYCFCDTENSQMSEVYVTRGESCEADHAIAYQVHTASLKAQVMISIGELNQTVDVFVNGDSPARIQQSKFILGPISSAWSPFDHKVIVYRDEVYNEDYAPYGSGQAGRFGDIQSRTVNSTDVYANTNLKLKRPASGNVHVPYTQTPSGFSYWKKEKGVPLNRNAPFGCIIKVNPVRAENCVYGNIPISMDIADAHFTRIDESPSVSLKACEVQSCTYSSDFGGVASISYTSNKVGKCAIHSHSNSATMKDSVQDVQESGALSLFFATSSVEPNFVVQVCNARITCHGKCEPPKDHIVPYAAKHNDAEFPSISTTAWQWLAHTTSGPLTILVVAIIVVVVVSIVVCARH

SEQ ID NO: 213 - protein, 675 aa, Aura virus
SRATAMCNVTCDRTCYNRNDTTMTNVNHSYDVDAARCTRRHVRSTTDDTTAYGCHRCKTMCYSKKVWDDADDGVRVSAGYNRAGTAASARRMGGGVGAADKVTSKCHSHKGYVVKCGDSTTSKVHGSDTCTMRVGYKVGRKYTMHGTCTYRTRKSAGYVTMHRGSTMMSGGVYVTSGRNVTYCKCGDKTGTVTARTKDGCTRKCASADHVKWVNSDRHTDHTAGKHACTVAHGVKHAYRSMSTHAHTTTRHGNTAWVGSVTRNSTGYTWGNKVRVYASAGNHGWHVRHYYHYYTVTVSGMGACAGVSCCCKARRDCTYANATVVTCCCRTSADTDTMGYWHSTMWVAAVTVRCCSCCVASNKADAYHTTVNANSYKAVRGYANVMVMNTSVKRYTCRYHTVVSKCCGTVCKGKADYTCKVTGVYWGGACCDSNSSDKYVSTDCATDHAAVRVHTASVKSRTYGNSTAVDVVNGVTARSKDMKAGSTTSDNKVYHGKVYNYDGAGTGAGDVASSTTGSDANTAHRARNHVYTASGWKNNSGSDTAGCKVNVNRADKCAVGSSVDDAATRVSSKCTVTSCTYSTDYGGVVTYSDRAGCAVHSHSSTAVRDSVYVKGTTKSTRSADVSMCGTRTTCHACTHVMNRKSTDSSASKTSWNWTAMGGSSAAAAVVAVTAHR

SEQ ID NO: 214 - protein, 252 aa, Bebaru Virus
GAYCCDANSSAYVVRSMCKDHAVAYRAHTASKAKVRVSGSVNTVTVNGSKAKVSGSMGVSTAWTDNKVVYKDVNDYGSGGRGDSRTTTSKDYANTAKARSAGTHVYTTSGRYWKKGSANSKAGCKTGVRAMNCAVGNVSDDAVTRTDSATTCTVASCTHSSDGGVASAKTDKAGKCAVHSHSNVATVADVDVTTGKVAHSTASASSTVSCAARANCRASCKDHVYAAKHNNVVDVSGTAGWVKVAGGTGAVA

SEQ ID NO: 215 - protein, 712 aa, Middleburg virus
TAVTTACSNTDCSCACCYKDAGTRMDNVDNGYYDAASTHCDARRRRRGTDYKAYKTKYAYCSDCGNGCYSARVRAASDGMKSAGVDGAHSWTKRYMKGHDVDTDRNSVTTGCTVHGTMGHVATCGDSTVAVDKHKVRHACRAYKHRVVGRHTVRHHGVCTTYAMRTSVTTMHVAHDVDNTSKTGNKVKTKGKSRYNCTCGSKSGVTKDKDNCVSCHTMVTAHDKWNSYVRAGSGKKGKHVSNSTCRVANTAKNGTHVATTYRTGKHHTWSSCRTVGYTWGNHAVRWATTKGSAHGMHSYYYGYATTVAVCVGACVASASCCCVSARNKCTYATGAVVCTSCCARAKAATATAAYWANTVWMAVACMVTYCRHMCCRTASVAVSGMGATAYHSVTNAVGYRAHVDRGSTHMVVSTSTADYVTCYKTVVSKVTCCGMSCAHKADCKVYTGVYWGGAYCCDSNTSAYVRSVCKHDHAAAYRAHTAAKAKSVTYGSTNGTAAVNGSTARGDKMGSTAWSDKVVYKDVYNDYYGSGGRGDSRTTSNDVYANTAKARSAGTVHVYTTSGKYWKKGDANHKAGCKTNVRANCAVGNVSDDAATRVDASTGKCVATCTHSSDGGTVVYKTDKVGTCAVHSSNTAVMTSSVTMDGRGTHSTASASSVKVCSSKTTCTAKCVKDHVVANHNNVVDSSTAVSWTHTMGGATVVAGTVTCASRH

SEQ ID NO: 216 - protein, 271 aa, Mucambo virus
LVTTMCLLANVTFPCSTPPICYDRAPAETLMMLSKNIDNPGYDELLEAVLKCPGRQKRSTEELFKEYKLTRPYMAKCVRCAVGSCHSPIAIEAVRSDGHDGYIRIQTSSQYGLDPSGNVKSRVMRYNLYGKIVEVPLHQVSLHTSRPCHIIDGHGYFLLARCPEGDSITMEFKKDSVTHSCSVPYEVKFTPVGRELYSHPPEHGTEHPCRVYAHDAQQKDAYVEMHLPGSEVDSSLLSMSGSAVRVTPPSGQSVLVECNCGSAVSETINTA

SEQ ID NO: 217 - protein, 343 aa, Ndumu Virus
GAYCFCSSENTQMSEAYVERAEVCKHEHALAYKTQTASLTATLKVTLGNITQGAKAYVNGETPFQIGQAKFVLGPISAAWSPFNPKIVVYKDDVYNYDFPAYGAGQPGRFGDIQSRTVDSKDLYARTHLRLDRPASGNIHVPYTQIPSEFKYWMQEKGEPLNRQAAFGCVVKTNPVRADNCAYGNIPISVDIPDAMFTRVVDIPAVSHLQCIDVSCAHSAGFGGVAKLRFMADRTGKCAIHTASKIVAIQEATVDLPEIAVGAGGGTAEITFHYSTALASPSFDVQLCSAHVTCDTKCEPPKDHIVPFAAQHMSNDMPNLSATAMNWVTGLGTSIGTFVFLFL

SEQ ID NO: 218 - protein, 987 aa, O'nyong-nyong virus
SLALPVMCLLANTTFPCSQPPCAPCCYEKKPEETLRMLEDNVMQPGYYQLLDSALACSQHRQRRNARENFNVYKVTRPYLAHCPDCGEGHSCHSPIALERIRSEATDGTLKIQVSLQIGIKTADSHDWTKLRYMDSHTPVDADRSGLFVRTSAPCTITGTMGHFILARCPKGETLTVGFVDSRRISHTCMHPFHHEPPLIGREKFHSRPQHGKELPCSTYVHTTAATTEEIEVHMPPDTPDYTLMTQQAGNVKITVDGQTVRYKCKCDGSNEGLITTDKVINNCKVDQCHTAVTNHKKWQYNSPLTPRNSEQGDRKGKIHIPFPLVNTTCRVPKARNPTVTYGKNRVTLLLYPDHPTLLSYRAMGRIPDYHEEWITSKKEISITVPAEGLEVTWGNNDPYKYWPQLSTNGTAHGHPHEIILYYYELYPTTTIAVLAAASIVVASLVGLSLGMCICARRRCITPYELTPGATIPFLLGILCCVKTAKAASYYEAATYLWNEQQPLFWLQLLIPLSAAIVVCNCLKLLPCCCKTLTFLAVMSIGARTVSAYEHATVIPNTVGVPYKTLVSRPGYSPMVLEMELQSVTLEPTLFLDYITCEYKTITPSPYVKCCGTAECKAKNLPDYNCKVFTGVYPFMWGGAYCFCDAENTQLSEAHVEKSESCKTEFASAYRAHTASVSAKLRVFYQGNNITVSAYANGDHAVTVKDAKFVIGPLSSAWSPFDNKIVVYKGEVYNMDYPPFGAGRPGQFGDIQSRTPDSKDVYANTQLILQRPAAGAIHVPYSQAPSGFKYWLKEKGASLQHTAPFGCQIATNPVRAVNCAVGNIPVSIDIPDAAFTRVTDAPSVTDMSCEVASCTHSSDFGGAAVIKYTASKKGKCAVHSLTNAVTIREPNVDVEGTAQLQIAFSTALASAEFKVQICSTQVHCSATCHPPKDHIVNYPSPHTTLGVQDISTTAMSWVQKITGGVGLVVAIAALILIIVLCVSFSRH

SEQ ID NO: 219 - protein, 265 aa, Pixuna virus
LVTTMCLLANVSFPCSQPPMCYDHKPAATLALLSANVDRPGYDDLLEAVLKCPGRARRSTDELFKEYKLTRPYMAKCIRCAVGSCHSPIAIEAVRSDGHDGYVRIQTSSQYGLDPSGSVKRRTMRYNMHGKIEEVPLHEVSLHTSRPCHIVDGHGYFLLARCPPGDSITMEFKKEHVTHLCSVPYEVRFTPVGRELYTHPPEHGAEHPCRVYAHDAQHHGAYVEMHLPGLEVDSTMLSLSGGAVQITPPTGKTAFVECKCGAQIS

SEQ ID NO: 220 - protein, 335 aa, Tonate Virus
GAYCFCDSENTQLSRAYVTKSDDCSADHALAYKAHTASVQAFLNITVGEQSTTAVVYVNGETPISFNGIRLVAGPLSTAWTPFDRKVVQYAGEIYNYDFPEYGAGHAGAFGDLQARTTTSNDLYANTNLVLQRPTAGTIHVPYTQAPSGFEQWKKDKPPSLKYTAPFGCEIYVNPVRAENCAVGSIPLAFDIPDALFTRVSETPTLSNAECSLNECVYSSDFGGIATVKYTASKSGKCAVHIPSGTATLKESLVDVVEQGSLTLHFSTANIHPEFKLQICTTHLTCKGDCHPPKDHIVTHPQLHAQTFTAAVSKTAWTWLTSLLGGSAVIIIIGL

SEQ ID NO: 221 - protein, 335 aa, Trocara virus
  VARIANT (278)..(278): Xaa can be any naturally occurring amino acid
GAQCFCESENTQMSEAYVDRSPDCKTLNAKAYRAHTANFKAKLNITFGDKYEVVEAFANGVTKVNAGQLTAVLGPMASPWSPFDNKIVLYKDKVYNYDFPEYGAGLPGAFGDIQMMSPTSADLYARTNLKLLRPNSGQIHVPYTQAPSGFVHWTNNSGKSLQDTAPFGCNIKTNPIRAENCAVGSIPVSLDIPDAEFTRVSEAPHITSASCTVTSCTSSTEAGGVMHIEYKAAKPGKCAVQALSSVVTITESNADIQTEGTLELHFSTAAIQADFRVXVCASGVQCTGPCRPPKEHIVAKPQLTTKEFKNAISSTSWNWVYALLGSTSSLLLVGV

SEQ ID NO: 222 - protein, 334 aa, Whataroa virus
GAQCFCDTENTQMSEAYVERSSDCAVDHAQALKVHTSSMKVGLKITYGNTTGMLDVFVNGVTPGTSKDLKVIAGPISAAFSPFDSKVVVYKGMVYNYDFPEFGAMKPGVFGDIQASSPTSNDLVANTDIRLLRPIARNVHVPYTQAASGFEMWKNNSGRPLQETAPFGCKVQTNPLRASDCAYGNIPISLDIPNAAFMRISDAPLISAATCTVSECIYSADYGGMASIQYTSDREGQCPVHSHSSTASLQESTVHVVQSGTVTVHFSTASPQANFVISLCGKKTICHAECKPPADHIVKTPHKNDQEFRSAVSTTSWSWLFALFGGASSLIFIG

SEQ ID NO: 223 - protein, 668 aa, Bussuquara virus
FKVVTGPEGPIMDVTKKDVGKALEIPFQNFNNTCWVMAMDVGHPCEDTIEYECPSLDIGAEPNDIDCWCDTMPMRVRYGRCTKGSIPKRSRRNAVFPQHTENVLATRQETWMNTDVIMKHLIKVETWALRNPGFALVAITLGWMLGSNRSQKIIFTILLLLVAPAYNMRCIGVENRDFVEGLSGGTWVDVVLEHGGCVTVRVEGKPTLDFELVQTKATGLAAVRAYCYQAKVSDIQISAACPAVQLTENSKATDSNYLCRRGVTNRGWNNGCGLFGKGDIHTCVKFKCEKKAAGFSIGKENLEYEVRASVHNSIGADKFSNELADGEPHTQKMKFSPLSPSAEKSFGDYGTLGMDCEPQSGLDFGQLYLMTIESKSWLVNRDWYHDLHLPYTVGSGSQWNNREALVEFQEPHATKQEVLALGSQEGALHSALAGAIMANRETSSPHALLLTAGHLKCRIKMDKMVIKGITYGQCSGTFKMEKHPADTGHGTVVLDVSYQGDDAPCKIPIVITSNLAEVEPVGRLVSAHPVITAKNVRTMLEVEPPYGDSYIVIGVGDGRLKQHWFKKGSVIGGAFSTTMKGAKRLAVLGDAAWDFGSVGGVFNSLGKAVHQLFGGIFRTLFGGMSWLSRLMIGALCLWIGINARDHSIAVTMLSVGGILIFLSINVSA

SEQ ID NO: 224 - protein, 271 aa, Jugra virus
FTSTGHMDVYEMDMTKVEYTIKTQVHSGAKSGDATLVKSIKFTPVSGTQTVEFSGYGTLGLECHVQSAIDFTTHYLVVIGSDAWLVHKQWVADVTLPWSHGDANVWRDKNYLVEFGEPHAATVKVLAMGPQEGALRTALAGAMVVSYDSGSKTFKLHGGHVTCKAMVNNLVLKGTTYQNCRGGLSFTKTPADTGHGTVVMQVKVTKNTPCRLTAIASDDASGRVNRGTLVTSNPVANSANDEVLIEINPPYGESYLIAGVGDDKLVYQWFQ

SEQ ID NO: 225 - DNA, 1692 bp, Artificial Sequence
  pGP80
atggagaggatcgtgctgctgctggccatcgtgagcctggtgaagagcgaccagatctgcatcggctaccacgccaacaagagcaccaagcaggtggacaccatcatggagaagaacgtgaccgtgacccacgcccaggacatcctggagaggacccacaacggcaagctgtgcagcctgaacggcgtgaagcccctgatcctgagggactgcagcgtggccggctggctgctgggcaaccccatgtgcgacgagttcctgaacgtgcccgagtggagctacatcgtggagaaggacaaccccatcaacagcctgtgctaccccggcgacttcaacgactacgaggagctgaagcacctgctgagcagcaccaaccacttcgagaagatccagatcatccccaggagcagctggagcaaccacgacgccagcagcggcgtgagcagcgcctgcccctacatcggcaggagcagcttcttcaggaacgtggtgtggctgatcaagaaggacaacgcctaccccaccatcaagaggagctacaacaacaccaaccaggaggacctgctgatcctgtggggcatccaccaccccaacgacgccgccgagcagaccaagctgtaccagaaccccaccacctacgtgagcgtgggcaccagcaccctgaaccagaggagcatccccgagatcgccaccaggcccaaggtgaacggccagagcggcaggatggagttcttctggaccatcctgaagcccaacgacgccatcaacttcgagagcaacggcaacttcatcgcccccgagtacgcctacaagatcgtgaagaagggcgacagcgccatcatgaagagcggcctggcctacggcaactgcgacaccaagtgccagacccccgtgggcgccatcaacagcagcatgcccttccacaacatccacccccacaccatcggcgagtgccccaagtacgtgaagagcgacaggctggtgctggccaccggcctgaggaacgtgccccagaggaagaagaggggcctgttcggcgccatcgccggcttcatcgagggcggctggcagggcatggtggacggctggtacggctaccaccacagcaacgagcagggcagcggctacgccgccgacaaggagagcacccagaaggccatcgacggcatcaccaacaaggtgaacagcatcatcgacaagatgaacacccagttcaaggccgtgggcaaggagttcaacaacctggagaggagggtggagaacctgaacaagaagatggaggacggcttcctggacgtgtggacctacaacgtggagctgctggtgctgatggagaacgagaggaccctggacttccacgacagcaacgtgaagaacctgtacgacaaggtgaggctgcagctgaaggacaacgccagggagctgggcaacggctgcttcgagttctaccacaagtgcgacaacgagtgcatggagagcgtgaggaacggcacctacgactacccccagtacagcgaggaggccaggctgaacagggaggagatcagcggcgtgaagctggagagcatgggcgtgtaccagatcctgagcatctacagcaccgtggccagcagcctggccctggccatcatgatcgccggcctgagcttctggatgtgcagcaacggcagcctgcagtgcaggatctgcatc

SEQ ID NO: 226 - DNA, 1680 bp, Artificial Sequence
  pGP81
atgaacacccagatcctggtgttcgccctgatcgccatcatccccaccaacgccgacaagatctgcctgggccaccacgccgtgagcaacggcaccaaggtgaacaccctgaccgagaggggcgtggaggtggtgaacgccaccgagaccgtggagaggaccaacatccccaggatctgcagcaagggcaagaggaccgtggacctgggccagtgcggcctgctgggcaccatcaccggccccccccagtgcgaccagttcctggagttcagcgccgacctgatcatcgagaggagggagggcagcgacgtgtgctaccccggcaagttcgtgaacgaggaggccctgaggcagatcctgagggagagcggcggcatcgacaaggaggccatgggcttcacctacagcggcatcaggaccaacggcgccaccagcgcctgcaggaggagcggcagcagcttctacgccgagatgaagtggctgctgagcaacaccgacaacgccgccttcccccagatgaccaagagctacaagaacaccaggaagagccccgccctgatcgtgtggggcatccaccacagcgtgagcaccgccgagcagaccaagctgtacggcagcggcaacaagctggtgaccgtgggcagcagcaactaccagcagagcttcgtgcccagccccggcgccaggccccaggtgaacggcatcagcggcaggatcgacttccactggctgatgctgaaccccaacgacaccgtgaccttcagcttcaacggcgccttcatcgcccccgacagggccagcttcctgaggggcaagagcatgggcatccagagcggcgtgcaggtggacgccaactgcgagggcgactgctaccacagcggcggcaccatcatcagcaacctgcccttccagaacatcgacagcagggccgtgggcaagtgccccaggtacgtgaagcagaggagcctgctgctggccaccggcatgaagaacgtgcccgagatccccaagggcaggggcctgttcggcgccatcgccggcttcatcgagaacggctgggagggcctgatcgacggctggtacggcttcaggcaccagaacgcccagggcgagggcaccgccgccgactacaagagcacccagagcgccatcgaccagatcaccggcaagctgaacaggctgatcgagaagaccaaccagcagttcgagctgatcgacaacgagttcaacgaggtggagaagcagatcggcaacgtgatcaactggaccagggacagcatcaccgaggtgtggagctacaacgccgagctgctggtggccatggagaaccagcacaccatcgacctggccgacagcgagatggacaagctgtacgagagggtgaagaggcagctgagggagaacgccgaggaggacggcaccggctgcttcgagatcttccacaagtgcgacgacgactgcatggccagcatcaggaacaacacctacgaccacagcaagtacagggaggaggccatgcagaacaggatccagatcgaccccgtgaagctgagcagcggctacaaggacgtgatcctgtggttcagcttcggcgccagctgcttcatcctgctggccatcgtgatgggcctggtgttcatctgcgtgaagaacggcaacatgaggtgcaccatctgcatc

SEQ ID NO: 227 - DNA, 2949 bp, Artificial Sequence
  pGP65
atgtcgctcgccactgtcatgtgcgtcctggccaatatcacgtttccatgtgatcaaccaccctgcatgccatgctgttatgaaaagaatccacacgaaacactcaccatgctggaacagaattacgacagccgagcctatgatcagctgctcgatgccgctgtgaaatgtaatgctaggagaaccaggagagatttggacactcatttcacccagtataagttggcacgcccgtatattgctgattgccctaactgtgggcatagtcggtgcgacagccctatagctatagaagaagtcagaggggatgcgcatgcaggagtcatccgcatccagacatcagctatgtttggtctgaagacggatggagtcgatttggcctacatgagtttcatgaacggcaaaacgcagaaatcaataaagatcgacaacctgcatgtgcgcacctcagccccttgttccctcgtgtcgcaccacggctattacatcttggctcaatgcccaccaggggacacggttacagttgggtttcacgacgggcctaaccgccatacgtgcacagttgcccataaggtagaattcaggccagtgggtagagagaaataccgtcacccacctgaacatggagttgaattaccgtgtaaccgttacactcacaagcgtgcagaccaaggacactatgttgagatgcatcaaccagggctagttgccgaccactctctccttagcatccacagtgccaaggtgaaaattacggtaccgagcggcgcccaagtgaaatactactgcaagtgtccagatgtacgagagggaattaccagcagcgaccatacaaccacctgcacggatgtcaaacaatgcagggcttacctgattgacaacaagaaatgggtgtacaactctggaagactgcctcgaggagagggcgacacttttaaaggaaaacttcatgtgccctttgtgcctgttaaggccaagtgcatcgccacgctggcaccggagcctctagttgagcacaaacaccgcaccctgattttacacctgcacccggaccacccgaccttgctgacgaccaggtcacttggaagtgatgcaaatccaactcgacaatggattgagcgaccaacaactgtcaatttcacagtcaccggagaagggttggagtatacctggggaaaccatccaccaaaaagagtatgggctcaagagtcaggagaagggaacccacatggatggccgcacgaagtggtagtctattactacaacagatacccgctaaccacaattatcgggttatgcacctgtgtggctatcatcatggtctcttgtgtcacatccgtgtggctcctttgcaggactcgcaatctttgcataaccccgtataaactagccccgaacgctcaagtcccaatactcctggcgttactttgctgcattaagccgacgagggcagacgacaccttgcaagtgctgaattatctgtggaacaacaatcaaaactttttctggatgcagacgcttatcccacttgcagcgcttatcgtatgcatgcgcatgctgcgttgcttattttgctgtgggccggcttttttacttgtctgcggcgccttgggcgccgcagcgtacgaacacacagcagtgatgccgaacaaggtggggatcccgtataaagctttagtcgaacgcccagggtatgcacccgttcacctacagatacagctggttaataccaggataattccatcaactaacctggagtacatcacctgcaagtacaagacaaaagtgccgtctccagtagtgaaatgctgcggtgccactcaatgtacctctaaaccccatcctgactatcagtgtcaggtgtttacaggtgtttacccattcatgtggggaggagcctactgcttctgcgacaccgaaaacacccagatgagcgaggcgtatgtagagcgctcggaagagtgctctatcgaccacgcaaaagcttataaagtacacacaggcactgttcaggcaatggtgaacataacttatgggagcgtcagctggagatctgcagatgtctacgtcaatggtgaaactcccgcgaaaataggagatgccaaactcatcataggtccactgtcatctgcgtggtccccattcgataacaaggtggtggtttatgggcatgaagtgtataattacgactttcctgagtacagcaccggcaaagcaggctctttcggagacctgcaatcacgcacatcaaccagcaacgatctgtacgcaaataccaacttgaagctacaacgaccccaggctggtatcgtgcacacacctttcacccaggcgccctctggcttcgaacgatggaaaagggacaaaggggcaccgttgaacgacgtagccccgtttggctgttcaattgccctggagccgctccgtgcagaaaattgtgcagtgggaagcatccctatatctatagatatacccgatgcggctttcaccagaatatctgaaacaccgacagtctcagacctggaatgcaaaattacggagtgtacttatgcctccgatttcggtggtatagccaccgttgcctacaaatccagtaaagcaggaaactgtccaattcattctccatcgggtgttgcagttattaaagagaatgacgtcacccttgctgagagcggatcatttacattccacttctccactgcaaacatccatcctgcttttaagctgcaggtctgcaccagtgcagttacctgcaaaggagattgcaagccaccgaaagatcatatcgtcgattatccagcacaacataccgaatcctttacgtcggcgatatccgccaccgcgtggtcgtggctaaaagtgctggtaggaggaacatcagcatttattgttctggggcttattgctacagcagtggttgccctagttctgttcttccatagacattaa

SEQ ID NO: 228 - DNA, 2946 bp, Artificial Sequence
  pGP66
atgtcactagtgaccactatgtgcctgctcgccaatgtgacgttcccatgtgccgaaccaccaatttgctacgacagaaaaccagcagagactttggccatgctcagcgttaacgttgacaacccgggctacgatgagctactggaagcagctgttaagtgccccggaagaaaaaggagatctaccaaggagctgtttaaggagtataagctaacgcgcccttacatggccagatgcatcagatgtgccgttgggagctgccatagtccaatagcaattgaggcagtgaagagcgacgggcacgacggctatgttagacttcagacttcctcgcagtatggcctggattcctctggcaacttaaagggaaggactatgcggtatgatatgcacgggaccattgaagagataccactacatcaagtgtcactccacacatctcgcccgtgtcacattgtggatgggcatggttattttctgcttgctaggtgcccggcaggggactccatcaccatggaatttaagaaaggttcagtcacacactcctgctcagtgccgtatgaagtgaaatttaatcctgtaggcagagaactctacactcatccaccagaacacggagcagagcaagcgtgccaagtctacgcgcacgatgcacagaacagaggagcttatgtcgagatgcacctcccgggctcagaagtggacagcagtttgatttccttgagcggcagttcagtcaccgtgacacctcctgtcgggactagcgccttggtggaatgcaagtgcggcggcacaaagatctccgaaaccatcaacaaggcaaaacagttcagccagtgcacaaagaaggagcagtgcagagcatatcgactgcagaatgacaagtgggtgtataattctgacaaactgcccaaagcagcgggagccaccctaaaaggaaaactacacgtcccgttcttgctggcagacggcaaatgcaccgtgcctctagcaccggaacctatgataaccttcggtttccgatcagtgtcactgaaactgcaccctaagaatcccacatatctgaccactcgccaacttgctgatgagcctcattacacgcacgagctcatatctgaaccagctgttaggaattttaccgtcactgaaaaggggtgggagtttgtatggggaaaccatccgccgaaaaggttttgggcacaggaaacagcacccggaaatccacatgggctgccacatgaggtgataactcattattaccacagataccctatgtccaccatcctgggtttgtcaatttgcgccgccattgtaaccgtttccgttgcagcgtccacctggctgttttgcaaatccagagtttcgtgcctaactccttaccggctaacacctaacgccaggatgccgctttgcctggccgtgctttgctgcgcccgcactgcccgggccgagaccacctgggagtccttggatcacctatggaacaataaccaacagatgttctggattcaattgctgatccctctggccgccttgattgtagtgactcgcctgctcaagtgcgtgtgctgtgtagtgccttttttagtcgtggccggcgccgcaggcgccggcgcctacgagcacgcgaccacgatgccgagccaagcgggaatctcgtataacaccatagtcaacagagcaggctacgcgccactccctatcagcataacaccaacaaagatcaagctgatacccacagtgaacttggagtacgtcacctgccactacaaaacaggaatggattcaccagccatcaaatgctgcggatctcaggaatgtactccaactaacaggcctgatgaacagtgcaaagtcttcacaggggtttacccgttcatgtggggaggtgcatattgcttttgcgacactgagaatactcaggtcagcaaggcctacgtaatgaaatctgacgactgccttgcggatcatgctgaagcatacaaagcgcacacagcctcagtgcaggcgttcctcaacatcacagtgggggaacactctattgtgaccaccgtgtatgtgaatggagaaactcctgtgaacttcaatggggtcaaactaactgcaggtccactttccacagcttggacaccctttgacagaaaaatcgtgcagtatgccggggagatctataattacgattttcctgagtatggggcaggacaaccaggagcatttggagacatacaatccagaacagtctcaagctcagatctgtatgccaataccaacctagtgctgcagagacccaaagcaggagcgatccatgtgccatacactcaggcaccatcgggttttgagcaatggaagaaagataaagctccgtcattgaaattcaccgcccctttcggatgcgaaatatatacaaaccccattcgcgccgaaaattgtgctgtagggtcaattccattagcctttgacattcccgacgccttgttcaccagggtgtcagaaacaccgacactttcagcggccgaatgcactcttaacgagtgcgtgtattcatccgactttggcgggatcgccacggtcaagtattcggccagcaagtcaggcaagtgcgcagtccatgtgccatcagggactgctaccctaaaagaagcagcagtcgagctaaccgagcaagggtcggcgaccattcatttctcgaccgcaaatatccacccggagttcaggctccaaatatgcacatcatatgtcacgtgcaaaggtgattgtcaccccccgaaagaccacattgtgacacacccccagtatcacgcccaaacatttacagccgcggtgtcaaaaaccgcgtggacgtggttaacatccctgctgggaggatcggccgtaattattataattggcttagtgctggctactattgtggccatgtacgtgctgaccaaccagaaacataattga

SEQ ID NO: 229 - DNA, 2937 bp, Artificial Sequence
  pGP67
atgtcactagttacagcactgtgcgtgctttcgaatgttacgttcccatgcgataaaccacccgtgtgctattcactggcgccagaacgaacactcgacgtgctcgaggagaacgtcaacaatccaaattacgacacgctgctggagaacgtcttgaaatgtccgtcacgccggcccaaacgaagcattaccgatgacttcacactgaccagtccctacctagggttctgcccgtattgcagacactcagcgccgtgtttcagcccaataaaaattgagaacgtgtgggacgaatctgatgatggatcgattagaatccaggtctcggcacaattcggctatgatcaggcaggcactgcagatgtcaccaaattccgttacatgtcttacgaccacgaccatgacatcaaggaagacagtgtgaagaaaatagctattagtacatctggaccctgccgtcgtcttggccacaaagggtacttcctgttagctcaatgtcctccaggtgacagtgtaaccgtcagtatcacgagcggagcatctgagaattcatgcaccgtggagaaaaagatcaggaggaagtttgtcggtagagaggagtacttgttcccacctgtccatggaaagctggtaaagtgccacgtttacgatcacttgaaggagacgtctgccggatacataaccatgcacaggccaggcccacacgcgtataagtcctatctggaggaagcgtcaggcgaagtgtacattaaaccaccttctggcaagaacgtcacctacgaatgtaagtgtggcgactacagcacaggtattgtgagcacgcgaacgaagatgaacggctgcaccaaagcaaaacagtgcattgcctacaagagcgaccaaacgaaatgggtctacaactcgccggatcttattaggcacacagaccactcagtgcaaggtaaactgcacattccattccgcttgacaccgacattctgcccggttccgttagctcacacgcctacagtcacgaagtggtttaaaggcatcaccctccacctgactgcaacgcgaccaacattgctgacaacgagaaaattggggctgcgagcagacgcaacagcagaatggattacagggactacatccaggaatttttctgtggggcgagaagggctggagtacgtatggggcaaccatgaaccagtcagagtctgggcccaggagtcggcaccaggcgacccgcatggatggccgcatgagatcatcatccactattatcatcggcatccagtctacactgtcattgtgctgtgcggtgtcgctcttgctatcctggtaggcattgcatcgtcagcagcttgtatcgccaaagcaagaagagactgcctgacgccatacgcgcttgcaccgaacgcaacggtacccacagcattagcagttttgtgctgtattcggccaaccaacgcagaaacatttggagaaactttgaatcatctgtggtttaacaaccaaccgtttctctgggcacagttgtgcatccctctggcagcgcttattattctgtttcgctgcttttcatgctgcatgccttttttattggttgcaggcgtctgcctggggaaggtagacgccttcgaacatgcgaccactgtgccaaatgttccggggatcccgtataaggcgttggtcgaacgtgcaggttacgcgccacttaatctggagattacggtcgtctcatcggaattaacaccctcaactaacaaggagtatgtgacctgcaaattccacacagtcattccttcaccgcaagttaaatgctgcgggtccctcgagtgtaaggcatcctcaaaagcggattacacatgccgcgtttttggcggtgtgtaccctttcatgtggggaggcgcacagtgcttctgtgacagtgagaacacacaactgagtgaggcatacgtcgagttcgctccagactgcactatagatcatgcagtcgcactaaaagttcacacagctgctctgaaagtcggcctgcgtatagtatacggcaataccaccgcgcacctggatacgttcgtcaatggcgtcacgccaggttcctcacgggacctgaaggtcatagcagggccgatatcagccgctttttcaccctttgaccataaggtcgtcatcagaaaggggcttgtttataactacgacttccctgagtatggagctatgaaaccaggagcgttcggcgatattcaagcatcctcgcttgatgccacagacatagtagcccgcactgacatacggctgctgaagccttctgtcaagaacatccacgtcccctacacccaagcagtatcagggtatgaaatgtggaagaacaactcaggacgacccctgcaagaaacagcaccatttggatgtaaaattgaagtggagcctctgcgagcgtctaattgtgcttatgggcacatccctatctcgattgacatccctgatgcagcttttgtgagatcatcagaatcaccaacaattttagaagtcagctgcacagtagcagactgcatttattctgcagactttggtggttcgctaacactacagtacaaagctgacagggagggacattgtccagttcactcccactccactacagctgttttgaaggaagcgaccacacatgtgactgccacaggcagcataacactacattttagcacatcgagcccacaagcaaatttcatagtttcgctatgcggcaagaagaccacttgcaatgctgaatgtaaaccaccggccgaccacataattggagaaccacataaggtcgaccaagaattccaggcggcagtttccaaaacatcttggaactggctgcttgcactgtttgggggagcatcatccctcattgctgtaggacttatagtgttggtctgcagctctatgcttataaacacacgtagatga

SEQ ID NO: 230 - DNA, 2964 bp, Artificial Sequence
  pGP68
atgtccgccccgctgattactgccatgtgtgtccttgccaatgctaccttcccgtgcttccagcccccgtgtgtaccttgctgctatgaaaacaacgcagaggccacactacggatgctcgaggataacgtggataggccagggtactacgacctccttcaggcagccttgacgtgccgaaacggaacaagacaccggcgcagcgtgtcgcaacacttcaacgtgtataaggctacacgcccttacatcgcgtactgcgccgactgcggagcagggcactcgtgtcatagccccgtagcaattgaagcggtcaggtccgaagctaccgacgggatgctgaagattcagttctcggcacaaattggcatagataagagtgacaatcatgactacacgaagataaggtacgcagacgggcacgccattgagaatgccgtccggtcatctttgaaggtagccacctccggagactgtttcgtccatggcacaatgggacatttcatactggcaaagtgcccaccgggtgaattcctgcaggtctcgatccaggacaccagaaacgcggtccgtgcctgcagaatacaatatcatcatgaccctcaaccggtgggtagagaaaaatttacaattagaccacactatggaaaagagatcccttgcaccacttatcaacagaccacagcggagaccgtggaggaaatcgacatgcatatgccgccagatacgccggacaggacgttgctatcacagcaatctggcaatgtaaagatcacagtcggaggaaagaaggtgaaatacaactgcacctgtggaaccggaaacgttggcactactaattcggacatgacgatcaacacgtgtctaatagagcagtgccacgtctcagtgacggaccataagaaatggcagttcaactcacctttcgtcccgagagccgacgaaccggctagaaaaggcaaagtccatatcccattcccgttggacaacatcacatgcagagttccaatggcgcgcgaaccaaccgtcatccacggcaaaagagaagtgacactgcaccttcacccagatcatcccacgctcttttcctaccgcacactgggtgaggacccgcagtatcacgaggaatgggtgacagcggcggtggaacggaccatacccgtaccagtggacgggatggagtaccactggggaaacaacgacccagtgaggctttggtctcaactcaccactgaagggaaaccgcacggctggccgcatcagatcgtacagtactactatgggctttacccggccgctacagtatccgcggtcgtcgggatgagcttactggcgttgatatcgatcttcgcgtcgtgctacatgctggttgcggcccgcagtaagtgcttgaccccttatgctttaacaccaggagctgcagttccgtggacgctggggatactctgctgcgccccgcgggcgcacgcagctagtgtggcagagactatggcctacttgtgggaccaaaaccaagcgttgttctggttggagtttgcggcccctgttgcctgcatcctcatcatcacgtattgcctcagaaacgtgctgtgttgctgtaagagcctttcttttttagtgctactgagcctcggggcaaccgccagagcttacgaacattcgacagtaatgccgaacgtggtggggttcccgtataaggctcacattgaaaggccaggatatagccccctcactttgcagatgcaggttgttgaaaccagcctcgaaccaacccttaatttggaatacataacctgtgagtacaagacggtcgtcccgtcgccgtacgtgaagtgctgcggcgcctcagagtgctccactaaagagaagcctgactaccaatgcaaggtttacacaggcgtgtacccgttcatgtggggaggggcatattgcttctgcgactcagaaaacacgcaactcagcgaggcgtacgtcgatcgatcggacgtatgcaggcatgatcacgcatctgcttacaaagcccatacagcatcgctgaaggccaaagtgagggttatgtacggcaacgtaaaccagactgtggatgtttacgtgaacggagaccatgccgtcacgatagggggtactcagttcatattcgggccgctgtcatcggcctggaccccgttcgacaacaagatagtcgtgtacaaagacgaagtgttcaatcaggacttcccgccgtacggatctgggcaaccagggcgcttcggcgacatccaaagcagaacagtggagagtaacgacctgtacgcgaacacggcactgaagctggcacgcccttcacccggcatggtccatgtaccgtacacacagacaccttcagggttcaaatattggctaaaggaaaaagggacagccctaaatacgaaggctccttttggctgccaaatcaaaacgaaccctgtcagggccatgaactgcgccgtgggaaacatccctgtctccatgaatttgcctgacagcgcctttacccgcattgtcgaggcgccgaccatcattgacctgacttgcacagtggctacctgtacgcactcctcggatttcggcggcgtcttgacactgacgtacaagaccaacaagaacggggactgctctgtacactcgcactctaacgtagctactctacaggaggccacagcaaaagtgaagacagcaggtaaggtgaccttacacttctccacggcaagcgcatcaccttcttttgtggtgtcgctatgcagtgctagggccacctgttcagcgtcgtgtgagcccccgaaagaccacatagtcccatatgcggctagccacagtaacgtagtgtttccagacatgtcgggcaccgcactatcatgggtgcagaaaatctcgggtggtctgggggccttcgcaatcggcgctatcctggtgctggttgtggtcacttgcattgggctccgcagataa

SEQ ID NO: 231 - DNA, 2949 bp, Artificial Sequence
  pGP69
atgtccgcagcaccactggtcacggcaatgtgtttgctcggaaatgtgagcttcccatgcgaccgcccgcccacatgctatacccgcgaaccttccagagccctcgacatccttgaagagaacgtgaaccatgaggcctacgataccctgctcaatgccatattgcggtgcggatcgtctggcagaagcaaaagaagcgtcattgacgactttaccctgaccagcccctacttgggcacatgctcgtactgccaccatactgtaccgtgcttcagccctgttaagatcgagcaggtctgggacgaagcggacgataacaccatacgcatacagacttccgcccagtttggatacgaccaaagcggagcagcaagcgcaaacaagtaccgctacatgtcgcttaagcaggatcacaccgttaaagaaggcaccatggatgacatcaagattagcacctcaggaccgtgtagaaggcttagctacaaaggatactttctcctcgcaaaatgccctccaggggacagcgtaacggttagcatagtgagtagcaactcagcaacgtcatgtacactggcccgcaagataaaaccaaaattcgtgggacgggaaaaatatgatctacctcccgttcacggtaaaaaaattccttgcacagtgtacgaccgtctgaaagaaacaactgcaggctacatcactatgcacaggccgagaccgcacgcttatacatcctacctggaagaatcatcagggaaagtttacgcaaagccgccatctgggaagaacattacgtatgagtgcaagtgcggcgactacaagaccggaaccgtttcgacccgcaccgaaatcactggttgcaccgccatcaagcagtgcgtcgcctataagagcgaccaaacgaagtgggtcttcaactcaccggacttgatcagacatgacgaccacacggcccaagggaaattgcatttgcctttcaagttgatcccgagtacctgcatggtccctgttgcccacgcgccgaatgtaatacatggctttaaacacatcagcctccaattagatacagaccacttgacattgctcaccaccaggagactaggggcaaacccggaaccaaccactgaatggatcgtcggaaagacggtcagaaacttcaccgtcgaccgagatggcctggaatacatatggggaaatcatgagccagtgagggtctatgcccaagagtcagcaccaggagaccctcacggatggccacacgaaatagtacagcattactaccatcgccatcctgtgtacaccatcttagccgtcgcatcagctaccgtggcgatgatgattggcgtaactgttgcagtgttatgtgcctgtaaagcgcgccgtgagtgcctgacgccatacgccctggccccaaacgccgtaatcccaacttcgctggcactcttgtgctgcgttaggtcggccaatgctgaaacgttcaccgagaccatgagttacttgtggtcgaacagtcagccgttcttctgggtccagttgtgcatacctttggccgctttcatcgttctaatgcgctgctgctcctgctgcctgccttttttagtggttgccggcgcctacctggcgaaggtagacgcctacgaacatgcgaccactgttccaaatgtgccacagataccgtataaggcacttgttgaaagggcagggtatgccccgctcaatttggagatcactgtcatgtcctcggaggttttgccttccaccaaccaagagtacattacctgcaaattcaccactgtggtcccctccccaaaaatcaaatgctgcggctccttggaatgtcagccggccgctcatgcagactatacctgcaaggtcttcggaggggtctacccctttatgtggggaggagcgcaatgtttttgcgacagtgagaacagccagatgagtgaggcgtacgtcgaattgtcagcagattgcgcgtctgaccacgcgcaggcgattaaggtgcacactgccgcgatgaaagtaggactgcgtattgtgtacgggaacactaccagtttcctagatgtgtacgtgaacggagtcacaccaggaacgtctaaagacttgaaagtcatagctggaccaatttcagcatcgtttacgccattcgatcataaggtcgttatccatcgcggcctggtgtacaactatgacttcccggaatatggagcgatgaaaccaggagcgtttggagacattcaagctacctccttgactagcaaggatctcatcgccagcacagacattaggctactcaagccttccgccaagaacgtgcatgtcccgtacacgcaggcctcatcaggatttgagatgtggaaaaacaactcaggccgcccactgcaggaaaccgcacctttcgggtgtaagattgcagtaaatccgctccgagcggtggactgttcatacgggaacattcccatttctattgacatcccgaacgctgcctttatcaggacatcagatgcaccactggtctcaacagtcaaatgtgaagtcagtgagtgcacttattcagcagacttcggcgggatggccaccctgcagtatgtatccgaccgcgaaggtcaatgccccgtacattcgcattcgagcacagcaactctccaagagtcgacagtacatgtcctggagaaaggagcggtgacagtacactttagcaccgcgagtccacaggcgaactttatcgtatcgctgtgtgggaagaagacaacatgcaatgcagaatgtaaaccaccagctgaccatatcgtgagcaccccgcacaaaaatgaccaagaatttcaagccgccatctcaaaaacatcatggagttggctgtttgcccttttcggcggcgcctcgtcgctattaattataggacttatgatttttgcttgcagcatgatgctgactagcacacgaagatga

SEQ ID NO: 232 - DNA, 2946 bp, Artificial Sequence
  pGP70
atgtgcctgttggcaaacaccacgttcccctgctcccagcccccttgcacgccctgctgctacgaaaaggaaccggaggaaaccctacgcatgcttgaggacaacgtcatgagacctgggtactatcagctgctacaagcatccttaacatgttctccccaccgccagcgacgcagcaccaaggacaacttcaatgtctataaagccacaagaccatacttagctcactgtcccgactgtggagaagggcactcgtgccatagtcccgtagcactagaacgcatcagaaatgaagcgacagacgggacgctgaaaatccaggtctccttgcaaatcggaataaagacggatgacagccacgattggaccaagctgcgttatatggacaaccacatgccagcagacgcagagagggcggggctatttgtaagaacatcagcaccgtgtacgattactgggacaatgggacacttcatcctggcccgatgtccaaaaggggaaactctgacggtgggattcactgacagtaggaagattagtcactcatgtacgcacccatttcaccacgaccctcctgtgataggtcgggaaaaattccattcccgaccgcagcacggtaaagagctaccttgcagcacgtacgtgcagagcaccgccgcaactaccgaggagatagaggtacacatgcccccagacacccctgatcgcacattaatgtcacaacagtccggcaacgtaaagatcacagtcaatggccagacggtgcggtacaagtgtaattgcggtggctcaaatgaaggactaacaactacagacaaagtgattaataactgcaaggttgatcaatgtcatgccgcggtcaccaatcacaaaaagtggcagtataactcccctctggtcccgcgtaatgctgaacttggggaccgaaaaggaaaaattcacatcccgtttccgctggcaaatgtaacatgcagggtgcctaaagcaaggaaccccaccgtgacgtacgggaaaaaccaagtcatcatgctactgtatcctgaccacccaacactcctgtcctaccggaatatgggagaagaaccaaactatcaagaagagtgggtgatgcataagaaggaagtcgtgctaaccgtgccgactgaagggctcgaggtcacgtggggcaacaacgagccgtataagtattggccgcagttatctacaaacggtacagcccatggccacccgcatgagataattctgtattattatgagctgtaccccactatgactgtagtagttgtgtcagtggccacgttcatactcctgtcgatggtgggtatggcagcggggatgtgcatgtgtgcacgacgcagatgcatcacaccgtatgaactgacaccaggagctaccgtccctttcctgcttagcctaatatgctgcatcagaacagctaaagcggccacataccaagaggctgcgatatacctgtggaacgagcagcaacctttgttttggctacaagcccttattccgctggcagccctgattgttctatgcaactgtctgagactcttaccatgctgctgtaaaacgttggcttttttagccgtaatgagcgtcggtgcccacactgtgagcgcgtacgaacacgtaacagtgatcccgaacacggtgggagtaccgtataagactctagtcaatagacctggctacagccccatggtattggagatggaactactgtcagtcactttggagccaacactatcgcttgattacatcacgtgcgagtacaaaaccgtcatcccgtctccgtacgtgaagtgctgcggtacagcagagtgcaaggacaaaaacctacctgactacagctgtaaggtcttcaccggcgtctacccatttatgtggggcggcgcctactgcttctgcgacgctgaaaacacgcagttgagcgaagcacacgtggagaagtccgaatcatgcaaaacagaatttgcatcagcatacagggctcataccgcatctgcatcagctaagctccgcgtcctttaccaaggaaataacatcactgtaactgcctatgcaaacggcgaccatgccgtcacagttaaggacgccaaattcattgtggggccaatgtcttcagcctggacacctttcgacaacaaaattgtggtgtacaaaggtgacgtctataacatggactacccgccctttggcgcaggaagaccaggacaatttggcgatatccaaagtcgcacacctgagagtaaagacgtctatgctaatacacaactggtactgcagagaccggctgtgggtacggtacacgtgccatactctcaggcaccatctggctttaagtattggctaaaagaacgcggggcgtcgctgcagcacacagcaccatttggctgccaaatagcaacaaacccggtaagagcggtgaactgcgccgtagggaacatgcccatctccatcgacataccggaagcggccttcactagggtcgtcgacgcgccctctttaacggacatgtcgtgcgaggtaccagcctgcacccattcctcagactttgggggcgtcgccattattaaatatgcagccagcaagaaaggcaagtgtgcggtgcattcgatgactaacgccgtcactattcgggaagctgagatagaagttgaagggaattctcagctgcaaatctctttctcgacggccttagccagcgccgaattccgcgtacaagtctgttctacacaagtacactgtgcagccgagtgccaccccccgaaggaccacatagtcaactacccggcgtcacataccaccctcggggtccaggacatctccgctacggcgatgtcatgggtgcagaagatcacgggaggtgtgggactggttgttgctgttgccgcactgattctaatcgtggtgctatgcgtgtcgttcagcaggcactaa

SEQ ID NO: 233 - DNA, 1509 bp, Artificial Sequence
  pGP58
atgcagctgagcatgagcagcctgatcggcttcggcaccctggtgctggccctgagcgcccagaccttcgacctgcagggcctgagctgcaacaccgacagcacccccggcctgatcgacctggagatcaggaggctgtgccacacccccaccgagaacgtgatcagctgcgaggtgagctacctgaaccacaccaccatcagcctgcccgccgtgcacaccagctgcctgaagtaccactgcaagacctactggggcttcttcggcagctacagcgccgacaggatcatcaacaggtacaccggcaccgtgaagggctgcctgaacaacagcgcccccgaggaccccttcgagtgcaactggttctactgctgcagcgccatcaccaccgagatctgcaggtgcagcatcaccaacgtgaccgtggccgtgcagaccttcccccccttcatgtactgcagcttcgccgactgcagcaccgtgagccagcaggagctggagagcggcaaggccatgctgagcgacggcagcaccctgacctacaccccctacatcctgcagagcgaggtggtgaacaagaccctgaacggcaccatcctgtgcaacagcagcagcaagatcgtgagcttcgacgagttcaggaggagctacagcctggccaacggcagctaccagagcagcagcatcaacgtgacctgcgtgaactacaccagcagctgcaggagcaagctgaggaggaggaggagggacacccagcagatcgagtacctggtgcacaagctgaggcccaccctgaaggacgcctgggaggactgcgagatcctgcagagcctgctgctgggcgtgttcggcaccggcatcgccagcgccagccagttcctgaggggctggctgaaccaccccgacatcatcggctacatcgtgaacggcgtgggcgtggtgtggcagtgccacagggtgaacgtgaccttcatggcctggaacgagagcacctactacccccccgtggactacaacggcaggaagtacttcctgaacgacgagggcaggctgcagaccaacacccccgaggccaggcccggcctgaagagggtgatgtggttcggcaggtacttcctgggcaccgtgggcagcggcgtgaagcccaggaggatcaggtacaacaagaccagccacgactaccacctggaggagttcgaggccagcctgaacatgaccccccagaccagcatcgccagcggccacgagaccgaccccatcaaccacgcctacggcacccaggccgacctgctgccctacaccaggagcagcaacatcaccagcaccgacaccggcagcggctgggtgcacatcggcctgcccagcttcgccttcctgaaccccctgggctggctgagggacctgctggcctgggccgcctggctgggcggcgtgctgtacctgatcagcctgtgcgtgagcctgcccgccagcttcgccaggaggaggaggctgggcaggtggcaggag

SEQ ID NO: 234 - DNA, 1488 bp, Artificial Sequence
  pGP71
agcaggtgcacccacctggagaacagggacttcgtgaccggcacccagggcaccaccagggtgaccctggtgctggagctgggcggctgcgtgaccatcaccgccgagggcaagcccagcatggacgtgtggctggacgccatctaccaggagaaccccgcccagaccagggagtactgcctgcacgccaagctgagcgacaccaaggtggccgccaggtgccccaccatgggccccgccaccctggccgaggagcaccagggcggcaccgtgtgcaagagggaccagagcgacaggggctggggcaaccactgcggcctgttcggcaagggcagcatcgtggcctgcgtgaaggccgcctgcgaggccaagaagaaggccaccggccacgtgtacgacgccaacaagatcgtgtacaccgtgaaggtggagccccacaccggcgactacgtggccgccaacgagacccacagcggcaggaagaccgccagcttcaccgtgagcagcgagaagaccatcctgaccatgggcgagtacggcgacgtgagcctgctgtgcagggtggccagcggcgtggacctggcccagaccgtgatcctggagctggacaagaccgtggagcacctgcccaccgcctggcaggtgcacagggactggttcaacgacctggccctgccctggaagcacgagggcgccaggaactggaacaacgccgagaggctggtggagttcggcgccccccacgccgtgaagatggacgtgtacaacctgggcgaccagaccggcgtgctgctgaaggccctggccggcgtgcccgtggcccacatcgagggcaccaagtaccacctgaagagcggccacgtgacctgcgaggtgggcctggagaagctgaagatgaagggcctgacctacaccatgtgcgacaagaccaagttcacctggaagagggcccccaccgacagcggccacgacaccgtggtgatggaggtgaccttcagcggcaccaagccctgcaggatccccgtgagggccgtggcccacggcagccccgacgtgaacgtggccatgctgatcacccccaaccccaccatcgagaacaacggcggcggcttcatcgagatgcagctgccccccggcgacaacatcatctacgtgggcgagctgagctaccagtggttccagaagggcagcagcatcggcagggtgttccagaagaccaagaagggcatcgagaggctgaccgtgatcggcgagcacgcctgggacttcggcagcgccggcggcttcctgagcagcatcggcaaggccctgcacaccgtgctgggcggcgccttcaacagcatcttcggcggcgtgggcttcctgcccaagctgctgctgggcgtggccctggcctggctgggcctgaacatgaggaaccccaccatgagcatgagcttcctgctggccggcgtgctggtgctggccatgaccctgggcgtgggcgcc

SEQ ID NO: 235 - DNA, 1607 bp, Artificial Sequence
  pGP29.3
acgtgagatcgccaccatggtgcctcaggctctgctgctggtccctatcctgggattcagctcctgcttcggcaagttccccatctacaccatccctgacaccctgggcccttggtccccaatcgacatccaccacctgagctgccccaacaacctggtcgtggaggatgaaggctgtaccaatctgagcggcttcagctacatggaactgaaggtgggatatatcagcgccatcaaggtgaatggcttcacctgcaccggcgtggtgaccgaggccgagacatacacaaacttcgtgggctacgtgaccacaaccttcaagcggaagcacttcagacctacaccagacgcctgtagagccgcctacaactggaagatggccggagatcccagatacgaggaatctctgcacagcccctaccccgactaccactggctgagaaccgtgaagacaaccaaggaatccctggtgattatcagccctagcgtggccgacctggacccttacgacaacagcctacatagcagagtgtttccttctggcaagtgtagcggcatcaccgtgtccagcgtgtactgcagcaccaaccacgactacaccgtttggatgcctgagagcctgcggctggggaccagctgcgacatttttactaatagcagaggaaaacgggcttctaaaggatctaaaacctgtggctttgtggacgagagaggcctgtacaaatctctgaaaggcgcctgcaagctgaagctgtgcggcgttctgggcctcagactgatggacggcacctgggttgctatgcaaacaagcaacgagacaaagtggtgtcctcctgaccagttggtgaacctgcacgatctgcggtctgatgagatcgagcacctggtgatcgaggaactggtcaagaagcgcgaggaatgcctggatgccctggaaagcatcattacaaccaaatcagtgtcttttagacggctgtcctacctgcggaagctggtgcccggcttcggcaaggcctatacaatctttaacaagaccctgatggaagcagaagcccactacaagagcgtgcggacctggaacgaaatcatccctagcaagggctgcctgagggtggggggcagatgccaccctcacgtgaacggcgtgttcttcaacggcatcatcctgggccctgacggccacgtgctgatccctgagatgcagagctctctgctgcagcagcacatcgagctgctcgagagctctgtgatcccactgatgcaccccctggccgatcctttcaccgttttcaaggacggcgacgaaacagaagatttcatcgaggtgcatctgcccgacgtgcacgagcaggtgtctggagtggacctgggcctgcctaattggggcgaatacgtgctgctgagcgctggcacccttatcgccctcatgctgatcatcttcctgatgacctgctgcagaaaggtggatagaccagagagcacccagcggagcctgagaggcaccggaagaaacgtgtccgtgacaagccagagcggcaagttcatccccagctgggagtcttataagagcggaggcgagacaggcctgtgaattcaccccaccagtg

SEQ ID NO: 236 - DNA, 1607 bp, Artificial Sequence
  pGP29.4
acgtgagatcgccaccatggttcctcaggtgctgctcttcgtgcctctgctggtcttttccatgtgcttcggcaaattccccatctacaccatcccagacaagctgggcccttggagccctatcgacatccaccacctgagctgccctaacaacctcgtggtggaagatgagggctgtacaaacctgtctggcttttcttatatggagctgaaagtgggatacatcagcgccatcaaggtgaacggcttcacctgcaccggcgtggtgacagaggccgagacatacaccaacttcgtgggctacgtgacaaccaccttcaagagaaagcacttccggcctacccctgacgcctgcagagccgcttacaactggaagatggccggcgatcctagatacgaggaaagcctgcataatccttatcctgactaccactggctgagaacagtgaaaaccaccaaggaatccctggtgatcatcagcccctctgtagccgatctggacccctacgacaagagcctgcacagcagagtgttccctagcggaaaatgcagcggtatcaccatctctagcacatactgcagcaccaaccacgactacacgatctggatgcccgagaaccccagactgggcacctcctgcgacatttttacaaatagccggggcaagcgggccagcaagggcggcaagacatgcggcttcgtggacgagagaggcctgtacaaaagcctgaagggcgcctgtaaactgaagctgtgcggagtgcttggcctgcgactgatggacggcacatgggtggccatgcaaacaagcgatgaaaccaagtggtgcccacctgaccagctggtgaacctgcatgatttcagaagcgacgaaatcgagcacctggtggtcgaggaactggtgaagaagcgggaggagtgcctggatgccctggaaagcatcatggctacaaagagcgtgtcatttcgcagactgagccacctgcggaagctggtgcctggcttcggcaaagcctacaccatcttcaacaagaccctgatggaagctgatgcccactacaagtctgtgcggacctggaacgagatcattcccagcaagggatgtctgagagtgggcggaaggtgccacccccacgtgaatggcgtgttcttcaacggcatcatcctgggccccgacggccacgtgctgatcccagagatgcagagcagcctgctgcagcagcacatggaactgctggaatctagcgtgatccctctgatgcaccccctggccgacccttctaccgtgtttaaggacggagatgaggctgaggacttcgtggaagtgcatctccctgacgtgcacaagcagatctctggcgttgatctgggactgcctagctggggcaagtacgtgctggtgtccgcaggcgtgctggtggtcctgatgctgaccattttcatcatgacctgttgtggcagagtgcacagacccaagtccacccagcacggcctgggcggaaccggcagaaaggtgtccgtcaccagccagtctggcaaagtaatcagcagctgggagagctacaagagtggaggcgagacaagactgtgaattcaccccaccagtg

SEQ ID NO: 237 - DNA, 1607 bp, Artificial Sequence
  pGP29.5
acgtgagatcgccaccatggtgcctcaggtgctgctgttcgtgccactgctgggatttagcctgtgcttcggaaaattcccaatctacaccatccccgataagctggggccttggagccctatcgacatccaccacctgtcatgccccaacaacctggtggtggaagatgagggctgcaccaacctgagcgagttcagctacatggaactgaaagtgggctacatcagcgccatcaaggtgaatggcttcacctgcaccggagtagtgaccgaggccgaaacctacacaaacttcgtgggctacgtcacaaccacattcaagagaaagcacttccggcccacccctgatgcttgtagagccgcttacaactggaagatggccggcgaccctcggtacgaggaaagcctgcacaacccttatcctgactaccactggctgagaacagtgagaaccaccaaagagtctctcatcattatcagccctagcgtgacagacctggatccttacgacaagtccctccattctcgggtgtttccaggcggaaagtgcagcggcatcaccgtgagctctacctactgcagcaccaaccacgactatacaatctggatgcccgagaaccccagacccagaacaccgtgcgacatcttcaccaacagcagagggaaaagagccagcaaaggcaacaaaacctgtggcttcgtggacgaaagaggcctgtataagtccctgaagggagcctgcagactgaagctgtgcggcgtgctgggccttagactgatggacggcacctgggtggccatgcagacaagcgacgagacaaagtggtgtcctcctgaccagctggtcaacctgcatgatttccgcagtgacgagatcgagcacctggtcgtggaagagctggttaagaagcgggaagagtgtctggacgccctggaaagcatcatgaccaccaagagcgtgtccttccggagactgagccacctgagaaagctggtgcccggctttggcaaggcctacaccatctttaacaagaccctgatggaagccgacgcccactacaagagcgtgcggacctggaacgagatcattcccagcaagggctgtctgaaagtgggaggccggtgccaccctcacgtgaatggcgtctttttcaacggcatcatcctgggccctgacggccacgtgctgattcctgagatgcaatctagcctcctgcagcagcacatggaactgctgaagtctagcgtgatccctctgatgcaccccctggccgatccttctaccgtgttcaaggaaggcgatgaggccgaggacttcgtcgaggtgcaccttcctgacgtgtacaagcagatctccggcgtggatctgggactgcctaattggggcaagtacgtgctgatgacagccggagctatgatcggcctggtgctgatcttctccctgatgacctggtgcagacgggctaatagacctgagtccaaacagagaagcttcggcggcacaggcaggaacgtgtctgtgacatctcagagcggcaaggtgatcccaagctgggagagttacaagagcggcggagaaatcagactgtgaattcaccccaccagtg

SEQ ID NO: 238 - DNA, 1607 bp, Artificial Sequence
  pGP29.6
acgtgagatcgccaccatggtgcctcaggccctgttgtttgtgccactcctggtgttcccactgtgcttcggcaaattccctatctacaccatcctggataagctgggcccatggagccccatcgacatccaccacctgtcttgtcctaacaacctggtggtcgaggatgagggctgcaccaatctgagcggcttcagctacatggagctgaaggtgggctacatcctggccatcaagatgaacggcttcacctgtacaggagtggtgaccgaggccgagacttatacaaacttcgtgggctacgtgacaacaaccttcaagcggaagcacttcagacctacacctgatgcctgtagagccgcttacaactggaaaatggccggcgatccaagatacgaggaatctctccataatccttatcctgattacagatggctgcgcaccgtgaagaccaccaaagagtccctggtcatcatctcccctagcgtggccgacctggacccttacgaccggagcctgcacagcagagtgttcccttccggcaagtgcagcggcgtggccgtgagctccacctactgctctacaaaccacgactacaccatctggatgcctgaaaaccccagactgggaatgagctgcgacatcttcacaaacagccggggcaagcgggcctctaagggcagcgagacctgcggatttgtggacgaaagaggcctgtacaagagcctcaaaggcgcctgcaagctgaagctgtgtggcgtgctgggtctcagactgatggacggcacatgggtggccatgcagaccagcaacgagaccaaatggtgcccccccgaccagctggtgaacctgcacgacttccggagcgacgagatcgagcacctggtggtggaagaactggttagaaagcgggaagagtgcctggacgctctggaaagcatcatgaccaccaagagcgtttcttttcggcggctgagccacctgagaaaactggtgcccggcttcggaaaggcctacaccatcttcaacaagacactgatggaagctgatgcccactacaagtctgtgaggacatggaacgagattctgcctagcaagggatgtctgagagtgggcggaagatgccacccccacgtgaatggcgtgtttttcaacggcatcatcctgggccctgatggcaacgtgctgatccctgagatgcaaagcagcctgctgcagcagcatatggaactgctggaaagctctgttatccccctggtgcatcctctggctgaccccagtaccgtgttcaaggacggcgacgaggctgaggacttcgtggaagtgcacctgcccgatgttcacaaccaggtgtccggcgtcgacctgggcctgcctaattggggcaagtacgtgctgctgagcgccggcgccctgaccgccctgatgctgatcatcttcctgatgacatgctgcagaagggttaacagaagcgagcctacccagcacaacctgcgcgggaccggcagagaggtgtctgtgacacctcagtctggaaagatcattagcagctgggagtcccacaagagcggaggagaaaccagactgtgaattcaccccaccagtg

SEQ ID NO: 239 - DNA, 1607 bp, Artificial Sequence
  pGP29.7
acgtgagatcgccaccatggtgccccaggcccttctgttcgtgcctctgctggtctttcctctgtgtttcggcaagttccccatctacacaatccctgataagctgggcccttggtcccctatcgacatccaccacctgtcttgccctaacaacctggtcgtggaagatgagggctgtacaaatctgagcggcttcagctacatggaactcaaagtgggctacatcctggctatcaaggtgaacggatttacctgtaccggcgtggtgaccgaggctgaaacctacaccaacttcgtgggatatgtgacaaccacattcaagcggaagcacttccggcctaccccagacgcctgcagagccgcttataactggaagatggccggagatcctagatacgaggaaagcctgcacaacccttaccccgattacagatggctgcgcaccgtgaagaccacaaaggaaagcctggtgatcatttctccttctgtcgccgatctggacccttacgacagaagcctgcacagcagagtgtttcctagcggcaaatgcagcggcgtggccgtgagcagtacatactgcagcaccaaccacgactacaccatttggatgccagagaaccccagactgggcatgagctgcgacatcttcaccaacagccggggaaaacgggcctctaagggcagcgagacatgtggcttcgttgacgagagaggcctgtacaagtcactgaagggcgcctgcaagctgaagctgtgcggcgtcctgggcctaagactgatggacggcacctgggtgtccatgcaaacaagcaacgagaccaagtggtgcccccccgacaagctggtgaatctccatgatttcaggtctgatgagatcgagcacctggtggtcgaggaactggtgcggaaaagagaagagtgcctggatgctcttgagagcatcatgacaaccaagagcgtgtccttcagacggctgagccacctgagaaagctggttcctggcttcggcaaagcctacaccatcttcaacaagaccctgatggaggccgacgcccactacaagtccgtgcggacctggaacgagatcctgccaagcaagggatgtctgcgggtgggcggcagatgccacccccacgtgaacggcgttttcttcaacggcatcatcctgggtcctgacggaaatgtgctgatccccgagatgcagagcagcctgctgcagcagcacatggaactgctggaatcttctgtgatcccactggtgcatcctctggccgaccctagcacagtgtttaaggacggcgacgaggccgaggacttcgtggaagtgcacctgcccgacgtgcacaaccaggtgagcggcgtggacctgggtctgcctaattggggcaaatacgtactgctgagcgccggcgctctgaccgccctgatgctgatcatctttctgatgacctgctgccggagagtgaacagaagcgagcccacccagcacaatctgaggggcacaggaagagaggtgtccgtgacccctcagagcggcaagatcatcagctcttgggaaagccacaagagcggcggagaaaccagactgtgaattcaccccaccagtg

SEQ ID NO: 240 - DNA, 1607 bp, Artificial Sequence
  pGP29.8
acgtgagatcgccaccatggtgccccaggccctgcttttcgtgccactgctggtgttccctctgtgcttcggcaagttccccatctacacaatccctgataagctgggcccttggtcccctatcgacatccaccacctgagctgtcctaacaacctggtggtggaggacgagggctgcacaaatctgagcggcttcagctacatggagctgaaggtgggctacatcctggctatcaagatgaacggattcacctgcaccggagtggtgaccgaggctgaaaactacaccaatttcgtgggctacgtcaccacgacattcaaaagaaagcacctgcggcccacacctgacgcctgtagggccgcttacaactggaaaatggccggcgaccctagatacgaggaatccctgcacaacccctatcctgattacagctggctgaggaccgtgaagaccaccaaggaaagcctcgtcatcatcagccctagcgtggccgatctggatccttacgacagaagcctccattctcgggtgtttccaagcggcaagtgcagcggcgttgccgtgtctagcacctactgcagcaccaaccacgattacaccatctggatgcctgagaaccctagactgggcaaaagctgcgacatcttcacaaatagcagaggaaaacgggcctctaagggcagcgaaacctgtggctttgtggacgagagaggcctgtacaagagcctgaaaggcgcctgcaagctgaaactctgcggcgtgctgggcctgagactgatggacggcacctgggtggccatgcaaaccagcaacgagacaaagtggtgcccacctgaccagctggtgaacctgcacgacttccggagcgacgagatcgagcacctggtagtggaagagctggtgcggaagcgggaagagtgcctggacgctctggaaagcatcatgaccaccaagtccgtgtcttttagacggctgtcccacctgcggaagctggtccccggcttcggcaaggcctataccatctttaacaagaccctgatggaagccgacgcccactacaagtccgtcagaacctggaacgagatcctgcctagcaagggatgtctgagagtgggcggaagatgccacccccacgtgaacggcgtgttcttcaacggcatcatcctgggccccgatggcaacgtgctgatccccgagatgcagagcagccttctccagcagcacatggaactgctggaaagctctgttattccactggtgcaccctctggccgacccttctacagtgttcaaggacggcgatgaggccgaggacttcgtggaagtgcatctgcctgatgtgcacaaccaggtgtccggagtggacctgggcctgcccaactggggaaaatacgtgctgctgagcgccggagccctgaccgccctgatgctgatcattttcctgatgacctgttgcagaagagtgaatagaagcgagcctacacagcacaatctgcgcggaacaggcagagaagtcagcgtgacacctcagacctggaagatcatctctagttgggagagtcacaagtctggcggcgagacaagactgtgaattcaccccaccagtg

SEQ ID NO: 241 - DNA, 1607 bp, Artificial Sequence
  pGP29.9
acgtgagatcgccaccatggtcccccaggccctgctgttcgtgccactgctggtgtttcctctctgcttcggaaaattccctatctacaccatccccgataagctgggcccatggagccccatcgacatccaccacctgagctgccccaacaacctggtggtggaggacgagggctgtaccaacctgtccggctttagctacatggaactgaaggtgggctacatcagcgccatcaagatgaacggcttcacatgtacaggcgtggtgaccgaggctgaaacttataccaacttcgtgggctatgtgacaaccacattcaagagaaagcacttccgccccacccctgatgcatgtagagccgcttacaactggaagatggccggcgaccctagatacgaggaaagcctgcataatccttaccccgactaccactggctgagaacagtgaagaccaccaaggaatctctggttatcatctcaccttctgtggctgacctggacccctacgacagatccctgcacagcagagtgttccctggcggcaattgcagcggcgtggccgtgtcttctacatactgcagcacaaaccacgactacaccatctggatgcctgagaaccccagactgggcatgagctgcgacatcttcaccaatagccggggcaagcgggccagcaagggcagcgagacctgtggcttcgtggacgagagaggcctgtacaagagcctgaagggagcctgtaaactgaagctgtgcggcgtgctgggcctgcggctgatggacggcacctgggtggccatgcagaccagcaacgaaaccaagtggtgcccacctggacagctggtgaacctccatgattttcggagcgatgagatcgagcaccttgtggtcgaggaactggtgaaaaagcgggaagagtgcctggatgccctggaaagcatcatgaccaccaaaagcgtgtccttcagaagactgtctcacctgagaaagttggtgcctggctttgggaaggcctacaccatctttaacaagaccctgatggaagccgacgcccactacaagagcgtgaggacctggaacgagatcattccaagcaagggctgcctgagagtgggcggtagatgccaccctcacgtgaacggcgtgttcttcaacggcatcatcctgggccctgatggcaacgtgctgatccctgagatgcaatctagcctgctgcagcagcacatggaactcctggtgtccagcgtgatccctctcatgcaccccctggccgatccttccacagtgttcaagaacggcgatgaagctgaggacttcgttgaggtgcacctgcctgacgtgcacgagcggatcagcggagtggacctgggactgcctaattggggcaaatacgtgctgctgagcgccggcgccctgaccgccctgatgctgatcatcttcctgatgacatgctggcggagagtgaatagaagcgagcctacccagcacaacctgcggggcaccggaagagaagtgtccgttacacctcagagcggcaagatcattagcagctgggagtcctacaaatctggcggagagacaggactgtgaattcaccccaccagtg

SEQ ID NO: 242 - DNA, 1607 bp, Artificial Sequence
  pGP29.1
acgtgagatcgccaccatggtgcctcaggtgcttctgttcgtgcccctgctgggcttcagcctgtgcttcggaaagttccctatctacaccatccctgatgagctgggaccttggtccccaatcgacatccaccacctcagctgccctaacaacctggtggtggaagatgagggctgcaccaacctgagcgagttcagctacatggagctgaaggtgggatacatctccgccatcaaggtgaacggctttacctgtaccggcgtggtgacagaagctgaaacctacacaaatttcgtgggctacgtgacaacaaccttcaagagaaagcacttccggcccacccctgacgcttgccgggctgcttataactggaagatggccggtgaccccagatacgaggaatccctgcacaacccttatcctgattaccactggctgaggaccgtgcggaccaccaaagagtccctgatcattatcagccctagcgtgaccgacctggacccttacgacaagagcctgcattctagaggctttccaggtggcaagtgcagcggcatcacagtgtctagcacctactgcagcaccaaccacgactacaccatctggatgcctgagaaccccggccctagaaccccgtgcgacatcttcaccaacagcagaggcaaaagggccagcaagggcaacaagacatgcggcttcgtggatgagagaggcctgtacaagtccctgaagggcgcctgtcggctgaagctctgtggcgtgctgggactgcggttgatggacggcacatgggtcgccatgcaaacatctgatgagacaaagtggtgcccccccgaccagctggtcaacctgcacgatttcagatctgacgagatcgagcacctggtggttgaggaactggtgaagaaacgggaagagtgcctggacgccctggaatccatcatgacaacaaagagcgtctccttccgcagactgagccacctgagaaagctggtgcctggctttggcaaggcctacaccatctttaacaagacactgatggaagccgacgcccactacaagtctgtgcgaacctggaacgagattatccccagcaaaggctgtctgaaagttggaggcagatgccacccccacgtgaatggagtctttttcaacggcatcatcctgggccctgacggccacgtgctgatccccgagatgcagtctagcctgctgcagcagcacatggaactgctgaagagcagcgtcatcccactgatgcaccctctggccgacccttcaacagtgttcaaggaaggagatgaagccgaggacttcgtggaagtgcatctgcctgatgtgtacaaacagatcagcggcgtggacctgggcctgccaaattggggcaagtacgtgctgatgaccgccggcgccatgatcggcctggtgctgatcttcagcctgatgacctggtgtagaagagccaatagacctgagtctaagcagagaagcttcggcggcaccggacggaacgtgtccgtgaccagccagagcgggaaagtgatccctagctgggaatcatatagaagcggcggcgagatccggctgtgaattcaccccaccagtg

SEQ ID NO: 243 - DNA, 1607 bp, Artificial Sequence
  pGP29.11
acgtgagatcgccaccatggtgccccaagccctgctgctggtgcctctgctgggcttttccctgtgcttcggcaagttccccatctacaccatccccaccaaactgggaccttggagccctatcgacatccaccacctgagctgccccaacaacctggtggtggaggatgagggatgcacaaacctgagcggcttcagctacatggaactgaaggtgggaagaatcagcgccatcaaggtcaacggcttcacctgtacaggcgtggtgaccgaggctgaaacatacacaaatttcgtgggatacgtgaccaccacttttaagagaaagcacttcagacctatgcccggctgcatgtacagccgggtgcagctggaagatggtcgctcccctcaaatcgaggaatctctgcacaacccctatcctgattaccactggctgagaaccgtgcggaccacaaaggaatccctgatcattatctctccaagcgtgaccgacctggatccttacgacaagagcctgcacagcagggtgttcccaggcagaaagtgcagcgggatcacagtgagcagcacctactgcagcaccaatcacgattatacagtgtggatgcctgagatcctgcggctgggaacatcttgtgacatctttacaaatagcagaggaaagagagcctctaagggcagcaagacctgcggcttcgtggacgagagaggcctgtacaagtccctgaaaggcgcctgcaagctgaagctctgtggcgtgcctggcctcagactgatggacggcacctgggtcgccatgcagaccagcaacgagacaaagtggtgccctcctggccagctggtgaacctgcacgacctgcatagcgacgaaattgagcacctggtggtggaagagctggtgaagaaaagagaggaatgcctggacgccctggaaagcattaccacaaccaagagcgtctccttccggagactgagccacctgagaaagctggtgcctggctttggaaaggcctacaccatcttcaacaagaccctgatggaagctgaggctcactacaagagcgtgcggacctggaacgagatcatcccatctaaaggctgccttcgggttggcggcggatgtcacccccacgtgaatggcgttttcttcaacggcatcatcctgggccctgatggccacgtgctgatccctgagatgcagtcttctctcctgcagcagcacatcgagctgctggaaagcagcgtgatccccctgatgcaccctctggccgacccattcaccgttttcaaagacggcgacgagatcgaggatttcgtggaagtgcatctgcccgacgtgcacgagcaggtgtctggcgtcgacctgggcctgcctaactggggcgagtacgtgctcctgagcgccggcacactgatcgccctgatgctgatcatctttctgatcacctgctgtaaaagagtggatagacccgagtctacacagcggagcctgagaggcaccggaaggaacgtgtccgtgaccagccagagcggcaagttcatccctagcagagaatcttacaagtccggcggcgagaccggcctgtgaattcaccccaccagtg

SEQ ID NO: 244 - DNA, 1607 bp, Artificial Sequence
  pGP29.12
acgtgagatcgccaccatggtgccccaggtgctgctgttcgtgttactgctgggattcagcctgtgttttggcaagttcccaatctacaccatccccgacgagctgggcccttggagccctatcgacatccaccacctgtcctgccccaacaacctggtcgtcgaggacgagggctgtaccaacctgagcgagttcagctacatggagctgaaggtgggctacatcagcgccatcaaggtgaatggatttacctgtacaggcgtggtgaccgaggccgagacatacacaaacttcgtgggttatgtgaccaccaccttcaagagaaagcacttcagacctacacctgacgcgtgcagagctgcttacaactggaagatggccggagatcctagatacgaggaatccctgcataatccttatcctgattaccactggctgcggaccgtgcggacaaccaaggaaagcctgatcatcatcagccctagcgttaccgacctggacccctacgacaagagcctgcacagcagagtgttccccggcagaaagtgcagcggcatcaccgtgtccagcacctactgcagcaccaaccacgactacaccatctggatgcctgagaacccccggcctagaacaccgtgcgacatcttcaccaacagcagaggaaaacgcgcttctaacggcaacaagacatgtggcttcgtggacgaaagaggcctgtacaaaagcctcaagggcgcttgtagactgaagctgtgcggcgtgctgggcctgagactgatggacggcacctgggtggccatgcagaccagcggagaaaccaaatggtgcccacctgatcagctggtgaaccttcatgattttagatctgatgagatcgagcacctggtggtggaagagctggtcaagaagcgggaggaatgcctggatgccctggagagcatcatgaccacaaagtctgtctcctttcggagactgagccacctgagaaaactggttcctggcttcggcaaggcctacaccatctttaacaagaccctgatggaagccgacgcccactacaagtccgtgcggacatggaatgagattatcccctctaaaggctgcctgaaagtgggcggaagatgccacccccacgtgaacggtgtgttcttcaacggcctgatcctgggacctgacgaccacgtgctgatcccagaaatgcagagcagcctgctgcagcaacacatggaactgctggaatcttctgtgatccctctgatgcaccctctggccgatccttctacagtgttcaaggaaggcgacgaggccgaggatttcgttgaagtgcacctgcctgacgtgtacaagcagatcagcggcgtggacctgggccttcctaactggggcaaatacgtgctgatgacagccggcgccatgatcggcctggtgctcatcttcagcctgatgacctggtgcaggcgggccaacagacccgagtccaagcagagaagcttcggcggcacaggcggaaatgtgtctgtgacatctcagagcggcaaggtgatcccaagctgggagtcatacaagagcgggggcgagattcggctgtgaattcaccccaccagtg

SEQ ID NO: 245 - DNA, 1607 bp, Artificial Sequence
  pGP29.13
acgtgagatcgccaccatggtgcctcaggccctgttgttcgtgcccctgctggtgttccccctgtgcttcggcaagttccctatctacaccattccagacaagctgggcccttggtccccaatcgacatccaccacctgcggtgccctaacaacctggtggtcgaggacgagggctgtaccaacctgagcggattcagctacatggaactgaaagtgggctacatcagcgccatcaaggtgaatggcttcacctgtaccggcgtggtgaccgaggccgagacatacaccaacttcgtgggctatgtcacaacaacttttaagagaaagcacttccggcctacccctgatgcttgtagagccgcttacaactggaagatggccggcgaccctagatacgaggaatccctgcacaacccttatcctgattaccactggctgagaaccgtgaagaccacaaaggaaagcctggtgatcatcagccctagcgtggccgatctggatccttacgacaagtccctgcacagcagagtgtttccttctggcaactgcagcggaatcacagtttctagcacatactgcagcaccaaccacgactacaccatctggatgcctgagaaccccagactggaaaccagctgcgacatcttcaccaatagccggggcaagagagcctctaagggcagcaagacatgcggcttcgtggacgagagaggcctgtacaaaagcctgaagggcgcctgcaaactgaaactgtgtggcgtgctgggactgagactgatggacggcacctgggtggccatgcaaacatcagatgaaaccaaatggtgcccacctgaccagctggtgaacctgcatgacttcagaagcgacgaaatcgagcacctggtggtggaagagctggtgaaaaagcgggaagagtgcctggacgccctggaaagcatcatgaccaccaagagcgtctccctgagacggctttctcacctgagaaagctggtccccggctttggcaaggcctacacaatctttaacaagaccctgatggaagctgaggcccactacaagagcgtgcagacctggaacgagatcatccccagcaagggttgtctgagggtgggcggcagatgccacccccacgtgaatggagtgttcttcaatggcatcatcctgggacctgatggccacgtgctgattccagagatgcagagctctctgctccagcagcacatggaattactcgagagcagcgtgatccctctgatgcaccctctggccgacccctctaccgtgtttaaggacggagatgaagccgaggatttcgttgaagtgcacctgcctgacgtgcataagcaggtgtccggagtggacctgggcctgcccaactggggcaagtacgtgctgctgagcgctggcacactgatcgccctgatgctgatcatcttcctgatgacctgctgcagacgcgtgaacagacctaagtccaccgagcggagcctgggcgagacaggccggaaggtgtccgtgaccagccagtctggcaaagtgatcagcagctgggagtcttacaagagcggaggcgagacaagacggtgaattcaccccaccagtg

SEQ ID NO: 246 - DNA, 1607 bp, Artificial Sequence
  pGP29.14
acgtgagatcgccaccatggtcccccaggtgctgctgttcgcccctctgctggtgtttccactgtgcttcggcaagttccctatctacacaatccctgacaagctcggaccttggtcccctatcgacctgcaccacctgtcctgccccaacaacctggtggtcgaggacgaaggctgtaccaatctgagcggattcagctacatggagctgaaggtgggctacatcagcgccatcaaggtgaacggcttcacatgtacaggcgtggtgacagaggccgaaacatacaccaacttcgtgggctatgtgaccacaacattcaaaagaaagcacttcagaccgacccctgatgcctgcagagccgcttacaactggaagatggccggcgatcctagatacgaggagtctctgcataatccttatcctgattaccactggctgcggaccgtgaagacaaccaaggaatctctggtgatcatttctccttctgtgacagacctggatccttacgacaagagcctgcacagcagagtcttccccggcggcaactgcagcggcatcaccgtgtccagcacatactgcagcaccaaccacgactacaccatctggatgcctgagaacctgcggctgggcactagctgcgacatctttacccactctagaggcaaacgggccagcaagggagataagacctgtggctttgtggatgaacggggcctgtacaaatccctgaagggagcctgtaaactgaaactgtgcggcgtgctgggtctgcgcctgatggacgggacctgggtggccatgcaaaccagcgacgagacaaagtggtgccctcctggccagctggtcaacctccatgatttcagaagcgacgagatcgagcacctggtggaagaggagcttgttaagaagagagaagagtgcctggacgctctggaatccatcatgaccacaaaaagcgtgtcttttcggcggctgagccacctgaggaagctggtgcccggcttcggcaaggcctacaccatcttcaacaagaccctgatggaagctgatgcccactacaaaagcgtgcagacctggaacgagatcatcccttctaagggatgtctgcgagtgggcgagcggtgccaccctcacgtgaatggcgttttcttcaacggcatcatcctgggatctgacggccacgtgctgattccagagatgcagagcagcctgctgcaacagcacatggagctgctggaaagcagcgtgatccccctgatgcaccccctggccgaccccagcaccgtgttcaaggacggcgacgaggtggaagattttgtggaagtccacttgcctgacgtgcacaagcaggtgtccggcgtggacctgggcctacccaagtggggaaagtacgtgctgatgatcgctggcgccctgatcgccctgatgctgattatcttcctgatgacctgctgcagaagagtgaacagacctgagagcacccagtctaatctgggtggcaccggcagaaacgtgtccgtgcctagccagagcggcaaggtgatcagcagctgggagagctacaagagcggcggagaaaccagactgtgaattcaccccaccagtg

SEQ ID NO: 247 - DNA, 1607 bp, Artificial Sequence
  pGP29.15
acgtgagatcgccaccatgatcccacaggccctgctgttcgtgcccctgctgatccccagcctgtgtctgggcaaattccccatctacaccattcctgataagctgggcccttggagccctatcgacatccaccacctgagctgccccaacaacctggtggtcgaggacgagggctgtactagcctgtccggatttagctacatggagctgaaggtgggctacatcagcgccatgaaagtgaacggattcacctgcaccggcgtggtgaccgaggccgagacatacaccaacttcgtcggatacgtcacaacaacattcaagcggaagcacttcagacctatgccagacgcctgcagagctgctcacgactggaagatcgccggcgatccacggtacgaggacagcctgcaaaatccttatcctgattaccactggctgaggacagtgaagaccaccaaggaaagcctagtgatcatcagtccttctgtggctgatctggatccttacgacaagagcctgcattctagagtgtttcctagcggcaagtgcctgggtatcaccgtgtctagcacctactgccctacaaatcacgattacactatctggatgcctgtggaagccagactgggaacaagttgcgacatctttaccaacagccggggcaagaaggccagcaaaggcggaagaacctgtggctttgtggacgaaagaggcctttataagagcctgaagggcgcctgtaaactgaagttgtgcggagttcctggcctgagactgatgaacggcacatgggtgtccatccagaccagcgacgacatcaagtggtgccctcccgatcagctggttaatctgcacgacttccactctgacgagatcgagcacctggtggtggaggaactgatcaagaaaagagaaggatgtctcgatgccctggaaagcatcatgaccacaaagtccgtctccttccggcgcctgagccacctgagaaagctggtccccggcttcggcaaagcctacaccatcttcaacaacaccctgatggaagccgacgcgcactacaagtctgttagaacctggaacgaggtgatcccttctaaaggctgcctgaaggtgggaggcagatgccaccctcctgtgaacggcgtgttcttcaacggcatcatcctgggcccagacggcaacgtgctgatccctgagatgcagagctctctgctgcagcagcacatggaactgctcgaaagcagcgtgatccccctgatgcaccccctggctgacccctccaccgtgttcaaggacggcgacgaggctgaagatttcgtggaagtgcacctgcccgacgtgcataagcaggtgtccgacgtggacctgggcctgcctagctggggcaagtacctgctcatgagcgccggagccctggccaccctgattctggccatcttcctgattacatgctgcagacgggccaatcggaccaagtctacccagcggggccacagagagagcggcggcaaggtgagcgtggcccctcaaaacggcaaaatcatcagcagctgggagctgtacaagagcgagagcgagacaggcatgtgaattcaccccaccagtg

SEQ ID NO: 248 - DNA, 1575 bp, Artificial Sequence
  pGP29.2
atggtgccccaggccctgctcttcgtgcctctgctcgtctttccactgtgcttcggcaaatttcccatctacactattcctgacaagctgggaccctggagtcctatcgatattcaccatctgtcatgccctaacaatctcgtggtcgaggatgaagggtgtaccaacctgtcaggtttcagctacatggagctgaaagtggggtatatcctcgctattaaggtcaacggcttcacatgcactggagtggtcaccgaggcagaaacctacacaaattttgtgggctatgtcaccacaactttcaagaggaaacactttagaccaacacccgacgcctgtcgcgccgcttacaactggaagatggctggcgatccacgatatgaggaatctctgcacaatccttacccagactatagatggctgcggacagtgaagaccacaaaagagagcctggtcatcattagcccatccgtcgcagacctggatccctacgatagatccctgcactctcgggtgtttccctctggcaagtgcagtggagtggccgtcagctccacttactgtagcaccaaccatgattatactatctggatgccagagaatccccggctgggaatgtcctgcgacattttcacatctagtcgcgggaagcgagccagtaaagggtcagagacttgtggttttgtggacgaaaggggcctgtataagagcctcaaaggagcttgcaagctgaaactctgtggcgtgctgggactcagactgatggatggaacctgggtctcaatgcagacaagcaacgagactaagtggtgcccccctgacaaactcgtgaatctgcacgacttcaggtccgatgagatcgaacatctggtggtcgaggaactcgtgcgaaaaagggaggaatgtctcgatgctctggagtctatcatgactaccaagtctgtgagttttaggagactcagtcacctgagaaagctcgtccctggcttcggaaaagcatacaccatctttaacaagacactgatggaagcagacgcccattataaaagcgtggagacctggaatgaaatcctgccatccaagggatgcctccgagtcggaggacgctgtcaccctcatgtgaacggcgtcttctttaatggaatcattctggggcctgacggtaacgtgctgatcccagagatgcagtcaagcctgctccagcagcacatggagctgctcgaatcctctgtgattcctctggtccatccactcgcagatccctctacagtgttcaaggacggggatgaggccgaagactttgtggaggtccacctgccagatgtgcataaccaggtgtctggggtcgacctcggtctgcccaattgggggaagtacgtgctgctcagcgccggtgcactgactgctctcatgctgatcattttcctgatgacctgctgtcgacgagtgaaccggtccgagcctactcagcacaatctgcgagggaccggtagagaagtgtccgtcacaccacagtctggcaaaatcattagttcatgggagagccataagtccgggggtgaaacacgcctgtga

SEQ ID NO: 249 - DNA, 1575 bp, Artificial Sequence
  pGP29
atggttcctcaggctctcctgtttgtaccccttctggtttttccattgtgttttgggaaattccctatttacacgataccagacaagcttggtccctggagtccgattgacatacatcacctcagctgcccaaacaatttggtagtggaggacgaaggatgcaccaacctgtcagggttctcctacatggaacttaaagttggatacatcttagccataaaagtgaacgggttcacttgcacaggcgttgtgacggaggctgaaacctacactaacttcgttggttatgtcacaaccacgttcaaaagaaagcatttccgcccaacaccagatgcatgtagagccgcgtacaactggaagatggccggtgaccccagatatgaagagtctctacacaatccgtaccctgactaccgctggcttcgaactgtaaaaaccaccaaggagtctctcgttatcatatctccaagtgtggcagatttggacccatatgacagatcccttcactcgagggtcttccctagcgggaagtgctcaggagtagcggtgtcttctacctactgctccactaaccacgattacaccatttggatgcccgagaatccgagactagggatgtcttgtgacatttttaccaatagtagagggaagagagcatccaaagggagtgagacttgcggctttgtagatgaaagaggcctatataagtctttaaaaggagcatgcaaactcaagttatgtggagttctaggacttagacttatggatggaacatgggtctcgatgcaaacatcaaatgaaaccaaatggtgccctcccgataagttggtgaacctgcacgactttcgctcagacgaaattgagcaccttgttgtagaggagttggtcaggaagagagaggagtgtctggatgcactagagtccatcatgacaaccaagtcagtgagtttcagacgtctcagtcatttaagaaaacttgtccctgggtttggaaaagcatataccatattcaacaagaccttgatggaagccgatgctcactacaagtcagtcagaacttggaatgagatcctcccttcaaaagggtgtttaagagttggggggaggtgtcatcctcatgtgaacggggtgtttttcaatggtataatattaggacctgacggcaatgtcttaatcccagagatgcaatcatccctcctccagcaacatatggagttgttggaatcctcggttatcccccttgtgcaccccctggcagacccgtctaccgttttcaaggacggtgacgaggctgaggattttgttgaagttcaccttcccgatgtgcacaatcaggtctcaggagttgacttgggtctcccgaactgggggaagtatgtattactgagtgcaggggccctgactgccttgatgttgataattttcctgatgacatgttgtagaagagtcaatcgatcagaacctacgcaacacaatctcagagggacagggagggaggtgtcagtcactccccaaagcgggaagatcatatcttcatgggaatcacacaagagtgggggtgagaccagactgtaa

SEQ ID NO: 250 - DNA, 1569 bp, Artificial Sequence
  pGP30
atgaatataccttgctttgttgtgattctcagcttagccactacacattctctgggagaattccccttgtacacaattcctgagaagatagagaaatggactcccatagacatgatccatctgagttgccccaacaacctattatctgaggaagaaggttgcaatgcagagtcatcctttacttactttgagctcaagagtggttacctagctcatcagaaggttccagggtttacctgtaccggggtcgtgaacgaggcagagacatatacaaacttcgtcgggtacgtcaccacaaccttcaaaaggaagcactttaggcctacagtagccgcctgtcgtgatgcctacaactggaaagtgtcaggagaccccaggtacgaagagtcactccacactccttatcctgacagcagttggttgaggactgtgactacaaccaaagaatcacttctcataatatcgcccagcatcgtggaaatggatatttacggcaggactctccattcccccatgtttccttcaggagtatgttccaacgtatatccctctgtcccatcctgtgagactaatcatgattacacattatggctgcctgaagatcctagtttgagtttggtctgtgatatctttacttccagcaacggaaagaaggccatgaacgggtcacgcatctgcggattcaaggatgaaaggggattctacagatctttaaagggcgcttgcaagctgacattgtgtggaagacctggaattaggttattcgacggaacttgggtctcttttacaaagccggacgtgcacgtatggtgcactcccaaccaattgatcaatatacacaatgacagactagatgagatagaacacctgatcgtggaagacatcataaagaaaagagaagagtgcttagacaccctggaaacaatacttatgtctcaatctgttagctttagaaggttgagccatttccgaaagttagttccaggatatgggaaggcctacactattttaaacggcagcctgatggaaacaaatgtctactacaaaagggtcgacaagtgggctgacatcttaccctctaagggatgtctgaaagtcgggcaacaatgcatggaacctgtcaaaggagtcctcttcaatgggattatcaagggcccggatggccaaattttgatccccgagatgcagtcagagcagctaaagcagcatatggacctgttgaaggcggctgtgtttcctctccgacaccctttaatcagccgggaggcagtctttaagaaagacggggatgccgatgattttgtggatctccatatgcctgatgtccacaagtctgtgtcagatgtcgacctgggtctgcctcattggggtttctggatgttgatcggggcaacaatagtagcatttgtggtcttggtatgtttactccgtgtatgttgtaagagagtgaggaggagaagatcaggacgtgcaactcaggagatccccctgagctttccctctgcccctgttcctcgagccaaagtggtgtcatcttgggagtcctataaagggcttccaggtacatga

SEQ ID NO: 251 - DNA, 1653 bp, Artificial Sequence
  pGP32.1
atggggcttaaggccagtgtctcagcgatattcatgacggtgctccttacgctccagacccctactgggcagatccattggggcaacctgtcaaaaataggtgtcgtagggatcggctccgcatcatataaggtgatgacgcggtccagtcaccagagcttggtgattaagttgatgcctaacatcactcttctgaataattgtacgcgggtggaaatcgcggagtatcgcagactcttgcgcacggtactcgagcctattagggatgcgcttaacgcaatgacgcagaacatcaggcctgtacaatcagtagcatccagcaggaggcataaacgattcgcgggggttgtcctcgcgggggctgctctcggtgttgccaccgctgcccaaattacggcgggtatagcgctccatcaatcaatgctgaatagccaggcgatagataacctgagagcgtccttggagacaactaatcaggcaatcgaaaccattagacaagccggacaggaaatgattttggccgtccagggaattcaagattacatcaataatgaattgattccttcaatgaaccaattgagttgtgatctgattggccaaaaactcggtttgaaattgctgaggtactacacggagatcctctctctttttggcccatccctccgcgatccaatttcagcagaaatctcaatccaagctctgagttatgctctcggcggcgatatcaacaaagtccttgaaaagctcggttatagtggtggggacctgttgggcatactcgagtcccgagggatcaaagcgcgaattactcacgtcgacactgaaagttacttcatcgttctgtctattgcttatcccacgttgagtgaaatcaagggagttatagtccaccgcttggagggcgtttcatataatattggttcccaagagtggtacacgacagtgccaaaatacgttgcgacccagggctatctcatcagcaactttgacgagtcatcttgtactttcatgccagaaggaacagtttgttcacagaatgccctgtatcctatgagcccgttgctccaagaatgtctcaggggatctactaaatcatgtgcgaggactcttgtaagcgggtcctttggaaatcggtttattcttagtcaaggaaatctcatagcgaactgtgcgagtattttgtgtaaatgttacacgaccggtacgatcataaatcaagacccagacaagattctgacctatattgctgcagactattgccccgtggtagaggtaaatggggtgactatacaggttgggtcacgcaaatatcccgatgccgtgtacttgcacaggatagatttgggccctcctattagcctcgaacgcctggacgtagggacgaacctgggaaatgcggtcgctaagctcgaagacgcaaaagagctgctcgaatcatccgatcagatactgcggagtatgaagggtctgagttccacaaacattgtttacattcttattgccgtttgcttggggggtctgattggcatacccactttgatttgttgttgccgaggtcgctgcaacaaaaaaggggggcaggtcggcatgagtcgaccgggccttaagccagacttgacaggtacgagtaaaagttacgttcgctccctttag

SEQ ID NO: 252 - DNA, 1854 bp, Artificial Sequence
  pGP32.2
atgtcaccacaacgagaccggataaatgccttctacaaagataacccccatcccaagggaagtaggatagttattaatagagaacatcttatgattgatagaccttatgttttgctggctgttctattcgtcatgtttctgagcttgatcgggttgctagccattgcaggcatcagacttcatcgggcagccatctacaccgcagagatccataaaagcctcagcaccaatctagatgtaactaactcaatcgagcatcaggtcaaggacgtgctgacaccactcttcaaaatcatcggtgatgaagtgggcctgagaacacctcagagattcactgacctagtgaaattcatctctgacaagattaaattcctcaatccggatagggagtacgacttcagagatctcacttggtgtatcaacccgccagagagaatcaaattggactatgatcaatactgtgcagatgtggctgctgaagagctcatgaatgcattggtgaactcaactctactggagactaggacaaccaatcagttcctagctgtctcaaagggaaactgctcagggcccactacaatcagaggtcaattctcaaacatgtcgttgtccctgttggacttgtatttgagtcgaggttacaatgtgtcatctatagtcactatgacatcccagggaatgtacgggggaacttacctagtggaaaagcctaatctgagcagcaaagggtcagagttgccacaaccaagcatgcaccgagtgtttgaagtaggtgtcatcagaaatccgggtttgggggctccggtgttccatatgacaaactattttgagcagccagtcagcaatgatttcagcaactgtatggtggctttgggggagctcaaactcgcagctctttgccacggggaagattctatcacaattccctatcagggatcagggaaaggtgtcagcttccagctcgtcaagctaggtgtctggaaatccccaaccgacatgcaatcctgggtccccttatcaacggatgatccagtgatagacaggctttacctctcatctcacagaggtattatcgctgacaatcaagcaaaatgggctgtcccgacaacacgaacagatgacaagttgcgaatggagacatgcttccagcaggcgtgtaagggtaaaatccaagcactctgcgagaatcccgagtgggcaccattgaaggataacaggattccttcatacggggtcttgtctgttgatctgagcctggcagttgagcttaaaatcaaaattgcttcaggattcgggccattgatcacacacggttcagggatggacctatacaaatccaaccacaacaatgtgtattggctgactatcccgccaatgaagaacctagccttaggtgtaatcaacacattggagtggataccgagattcaaggttagtcccaacctctttactgtcccaattaaggaagcaggcgaggactgccatgccccgacatacctacctgcggaggtggatggtgatgtcaaactcagttccaatctggtgattctacctggtcaagatctccaatatgttttggcaacctacgatacttccagggttgaacatgctgtggtttattacgtttacagcccaagccgctcattttcttacttttatccttttaggttgcctataaagggagtccccatcgaattacaagtggaatgcttcacatgggaccaaaaactctggtgccgtcacttctgtgtgcttgcagactcagaatctggtggacatatcactcactctgggatggtgggtatgggagtcagctgcacagtcactcgggaagatggaaccaaccgcggatag

SEQ ID NO: 253 - DNA, 1467 bp, Artificial Sequence
  pGP6
atgggtaagtttctcgccactttgattttattcttccagttctgccccctcatcttcggtgattacagccccagctgctgtactctcacaattggagtctcctcataccactctaaaccctgcaatcctgcccagccagtttgttcgtggaccctcgacctgctggccctttcagcagatcaggccctacagcccccctgccctaacctagtaagttactccagctaccatgccacctattccctatatctattccctcattggactaagaagccaaaccgaaatggcggaggctattattcagcctcttattcagacccttgttccttaaagtgcccatacctggggtgccaatcatggacctgcccctatacaggagccgtctccagcccctactggaagtttcaacacgatgtcaattttactcaagaagtttcacgcctcaatattaatctccatttttcaaaatgcggttttcccttctcccttctagtcgacgctccaggatatgaccccatctggttccttaataccgaacccagccaactgcctcccaccgcccctcctctactcccccactctaacctagaccacatcctcgagccctctataccatggaaatcaaaactcctgacccttgtccagttaaccctacaaagcactaattatacttgcattgtctgtatcgatcgtgccagcctctccacttggcacgtcctatactctcccaacgtctctgttccatcctcttcttctacccccctcctttacccatcgttagcgcttccagccccccacctgacgttaccatttaactggacccactgctttgacccccagattcaagctatagtctcctccccctgtcataactccctcatcctgccccccttttccttgtcacctgttcccaccctaggatcccgctcccgccgagcggtaccggtggcggtctggcttgtctccgccctggccatgggagccggagtggctggcgggattaccggctccatgtccctcgcctcaggaaagagcctcctacatgaggtggacaaagatatttcccagttaactcaagcaatagtcaaaaaccacaaaaatctactcaaaattgcgcagtatgctgcccagaacagacgaggccttgatctcctgttctgggagcaaggaggattatgcaaagcattacaagaacagtgccgttttccgaatattaccaattcccatgtcccaatactacaagaaagacccccccttgagaatcgagtcctgactggctggggccttaactgggaccttggcctctcacagtgggctcgagaggccttacaaactggaatcacccttgttgcgctactccttcttgttatccttgcaggaccatgcatcctccgtcagctacgacacctcccctcgcgcgtcagatacccccattactctcttataaaacctgagtcatccctgtaa

SEQ ID NO: 254 - DNA, 1467 bp, Artificial Sequence; identical to SEQ ID NO: 253
  pGP7

SEQ ID NO: 255 - DNA, 1698 bp, Artificial Sequence
  pGP8
atgaaactcccaacaggaatggtcattttatgtagcctaataatagttcgggcagggtttgacgacccccgcaaggctatcgcattagtacaaaaacaacatggtaaaccatgcgaatgcagcggagggcaggtatccgaggccccaccgaactccatccaacaggtaacttgcccaggcaagacggcctacttaatgaccaaccaaaaatggaaatgcagagtcactccaaaaaatctcacccctagcgggggagaactccagaactgcccctgtaacactttccaggactcgatgcacagttcttgttatactgaataccggcaatgcagggcgaataataagacatactacacggccaccttgcttaaaatacggtctgggagcctcaacgaggtacagatattacaaaaccccaatcagctcctacagtccccttgtaggggctctataaatcagcccgtttgctggagtgccacagcccccatccatatctccgatggtggaggacccctcgatactaagagagtgtggacagtccaaaaaaggctagaacaaattcataaggctatgcatcctgaacttcaataccaccccttagccctgcccaaagtcagagatgaccttagccttgatgcacggacttttgatatcctgaataccacttttaggttactccagatgtccaattttagccttgcccaagattgttggctctgtttaaaactaggtacccctacccctcttgcgatacccactccctctttaacctactccctagcagactccctagcgaatgcctcctgtcagattatacctcccctcttggttcaaccgatgcagttctccaactcgtcctgtttatcttcccctttcattaacgatacggaacaaatagacttaggtgcagtcacctttactaactgcacctctgtagccaatgtcagtagtcctttatgtgccctaaacgggtcagtcttcctctgtggaaataacatggcatacacctatttaccccaaaactggacaggactttgcgtccaagcctccctcctccccgacattgacatcatcccgggggatgagccagtccccattcctgccattgatcattatatacatagacctaaacgagctgtacagttcatccctttactagctggactgggaatcaccgcagcattcaccaccggagctacaggcctaggtgtctccgtcacccagtatacaaaattatcccatcagttaatatctgatgtccaagtcttatccggtaccatacaagatttacaagaccaggtagactcgttagctgaagtagttctccaaaataggaggggactggacctactaacggcagaacaaggaggaatttgtttagccttacaagaaaaatgctgtttttatgctaacaagtcaggaattgtgagaaacaaaataagaaccctacaagaagaattacaaaaacgcagggaaagcctggcatccaaccctctctggaccgggctgcagggctttcttccgtacctcctacctctcctgggacccctactcaccctcctactcatactaaccattgggccatgcgttttcagtcgcctcatggccttcattaatgatagacttaatgttgtacatgccatggtgctggcccagcaataccaagcactcaaagctgaggaagaagctcaggattga

SEQ ID NO: 256 - DNA, 2058 bp, Artificial Sequence
  pGP9
atggtattgctgcctgggtccatgcttctcacctcaagcctgcaccaccttcggcaccagatgagtcctgggagttggaaaagactgatcatcctcttaagctgcgtattcggcggcggcggaacgagtctgcaaaataagaacccccaccagcctatgaccctcacctggcaggtactgtcccaaactggagacgttgtctgggatacaaaggcagtccagcccccttggacttggtggcccacacttaaacctgatatatgtgccttggcggctggtcttgagtcctgggatatcccgggaaccgatgtctcgtcctctaaacgagtcagacctccggactcagactatactgccgcttataaacaaatcacctggggagccatagggtgcagctaccctcgggctaggaccagaatggcaagctccaccttctacgtatgtccccgggatggccggaccccttcagaagctagaaggtgcggggggctagaatccctatactgtaaagaatggaattgtgaaaccacagggaccggttattggctacccaagtcctcaaaagacctcataacgggtagatgggatcaaaatagcaaatgggatcaaaaatttcaaaagtgtcaccagaccggctggtgtaacccccttaaaatagatttcacagacacaggaaaatcctccagggattggatagtaggaaaaacctggggattaagattctatgtgcatggacatccaggcgtccagttcaccattcgcttaaaaatcaccagcatgacagctgtggcagtcggccccgatcccgtccttgtggaacaaggacctcccagaagggccctcgctctcccacctcctctccccccaagggaagcgccaccgccacctctccccgactccaactccacaaccctggcgactagtgcacaaactcccacggtgggaaaaacaattgttaccctaaacactccgcctcccaccacaggcgacagactctttaacctcgtgcagggggccttcctaaccctgaatgctaccaacccaggggccactaagtcatgctggctttgtttggccatgggtcccccctattatgaagcaataacctcattgggggaggtcgcttattccaccagccaggaccggtgccactggggaacccaaggaaagcttaccctcactgaggtctcaggacacgggttatgcataggaaaggtgcccttcacccatcagcatctctgcaatcagaccctatccatcaattcctccgagggccatcagtatctgctcccctccaatcatagctggtgggcttgcagcactggcctcaccccttgcctctctacctcagtttttaatcagagtcgagatttctgtatccaggtccagctgatccctcgcatctattactatcctgaagaagttttgttacaggcctatgacgattctcaccccaggcctaaaagagaagctgtctcacttaccctagctgttttactggggttggggatcacggcgggtataggtactggttcaaccgccttaattaaaggacccatagacctccaacaaggcctgaccagcctccagatcgccatagatgctgacctccgggccctccaggactcagtcagcaagctggaggactcactgacctccctgtccgaggtagtactccaaaataggagaggccttgacttgctgtttctaaaggaaggaggcctctgtgcggccctaaaagaagagtgctgtttttatatagaccactcaggtgcagtacgagactccatgaaaaaactcaaagaaaaactagataaaagacagttagagcgccagaaaaaccaaaactggtatgaagggtggttcaataactccccttggttcactaccctactatcaaccattgccgggcccctgttactcctccttctattgctcatcctcgggccctgcatcatcaataagttagttcaattcatcaatgatagagtaagtgcagttaaaattttggtccttaggacaaaatatcaggccctagataacgaagataacctttaa

SEQ ID NO: 257 - DNA, 1998 bp, Artificial Sequence
  pGP10
atggcgcgttcaacgctctcaaaaccccttaaaaataaggttaacccgcgaggccccctaatccccttaattcttctgatgctcagaggggtcagtactgcttcgcccggctccagtcctcatcaagtctataatatcacctgggaggtaaccaatggagatcgggagacggtatgggcaacttctggcaaccaccctctgtggacctggtggcctgaccttaccccagatttatgtatgttagcccaccatggaccatcttattgggggctagaatatcaatcccctttttcttctcccccggggcccccttgttgctcagggggcagcagcccaggctgttccagagactgcgaagaacctttaacctccctcacccctcggtgcaacactgcctggaacagactcaagctagaccagacaactcataaatcaaatgagggattttatgtttgccccgggccccaccgcccccgagaatccaagtcatgtgggggtccagactccttctactgtgcctattggggctgtgagacaaccggtagagcttactggaagccctcctcatcatgggatttcatcacagtaaacaacaatctcacctctgaccaggctgtccaggtatgcaaagataataagtggtgcaaccccttagttattcggtttacagacgccgggagacgggttacttcctggaccacaggacattactggggcttacgtttgtatgtctccggacaagatccagggcttacatttgggatccgactcagataccaaaatctaggaccccgcgtcccaatagggccaaaccccgttctggcagaccaacagccactctccaagcccaaacctgttaagtcgccttcagtcaccaaaccacccagtgggactcctctctcccctacccaacttccaccggcgggaacggaaaataggctgctaaacttagtagacggagcctaccaagccctcaacctcaccagtcctgacaaaacccaagagtgctggttgtgtctagtagcgggacccccctactacgaaggggttgccgtcctgggtacctactccaaccatacctctgctccagccaactgctccgtggcctcccaacacaagttgaccctgtccgaagtgaccggacagggactctgcataggagcagttcccaaaacacatcaggccctatgtaataccacccagacaagcagtcgagggtcctattatctagttgcccctacaggtaccatgtgggcttgtagtaccgggcttactccatgcatctccaccaccatactgaaccttaccactgattattgtgttcttgtcgaactctggccaagagtcacctatcattcccccagctatgtttacggcctgtttgagagatccaaccgacacaaaagagaaccggtgtcgttaaccctggccctattattgggtggactaaccatggggggaattgccgctggaataggaacagggactactgctctaatggccactcagcaattccagcagctccaagccgcagtacaggatgatctcagggaggttgaaaaatcaatctctaacctagaaaagtctctcacttccctgtctgaagttgtcctacagaatcgaaggggcctagacttgttatttctaaaagaaggagggctgtgtgctgctctaaaagaagaatgttgcttctatgcggaccacacaggactagtgagagacagcatggccaaattgagagagaggcttaatcagagacagaaactgtttgagtcaactcaaggatggtttgagggactgtttaacagatccccttggtttaccaccttgatatctaccattatgggacccctcattgtactcctaatgattttgctcttcggaccctgcattcttaatcgattagtccaatttgttaaagacaggatatcagtggtccaggctctagttttgactcaacaatatcaccagctgaagcctatagagtacgagccatag

SEQ ID NO: 258 - DNA, 1692 bp, Artificial Sequence
  pGP11
atgggattcacaacaaagataatcttcttatacaacctagtactggtctacgcggggtttgacgaccctcgcaaagccatagaactagtacaaaagcgatatggccgaccatgcgattgcagcggaggacaagtgtccgagcccccgtcagacagggtcagtcaagtgacttgctcaggcaagacagcttacttaatgcccgaccaaagatggaaatgtaagtcaattccaaaagacacctccccaagcgggccactccaagagtgcccctgtaattcttaccagtcctcagtacacagttcttgttatacctcataccaacaatgcagatcaggcaataagacatattatacggctactctgctaaaaacacaaactgggggcaccagtgatgtacaagtattaggatccaccaacaaacttatacaatctccctgtaatggcataaaagggcagtctatttgctggagcactacagctcctatccacgtctctgatggaggaggtccattagacaccacaagaattaaaagtgttcagagaaaactggaagaaattcataaagccctatatcctgaacttcagtatcaccctttggccatacctaaggttagagataacctcatggtcgatgcccagactttaaacattctcaatgccacttacaacttactcctaatgtccaacacgagcctagtggacgactgttggctttgtttaaaattaggtccccctactcccctcgcaatacctaacttcctattatcctacgtgactcgctcctcggataatatctcttgtttaataattcccccccttctagttcaaccgatgcagttttccaattcatcttgcctcttttccccctcctacaacagtacagaagaaatagatctaggccatgttgccttcagcaactgtacctccataaccaatgtcaccggtcccatatgcgctgtaaatggttcggtctttctctgtggcaataacatggcatacacttatctacccacgaactggacggggctttgcgtcctagcaactctcctccccgacattgacatcattcccggagatgaaccggtccccatccctgctattgatcattttatatatagacctaaacgggccatacagtttattcctttactagcagggctagggatcaccgcagccttcacaacaggagctacaggcctaggtgtctctgtgacccaatatacaaaattatctaatcagctaatttctgatgtacaaatcttatctagcaccatacaagatctgcaagatcaagtagactcattagccgaagtggttctccagaacagaagggggctagatctacttacagcagaacaaggaggaatctgtttagccctgcaagaaaaatgctgcttttatgttaacaagtcagggattgtgagagacaaaataaaaaccttacaagaagaactagaaagacgtagaaaagatctagcttccaacccactttggactgggcttcaagggctcctcccttacctcctgccctttcttggccctctacttaccctcctgctcttactcaccattgggccgtgcatttttaaccgtctaaccgcttttattaatgataagttaaacataatacacgctatggtgctaacccaacagtatcaggtgctcagaaccgatgaagaagctcaagattga

SEQ ID NO: 259 - DNA, 2958 bp, Artificial Sequence
  pGP12
atgacactgcaacaatggatcatttggaaaaaaatgaataaagcgcatgaggcacttcaaaatacaacaactgtgactgaacagcagaaggaacaaattatactggacattcaaaatgaagaagtacaaccaactaggagagataaatttagatatctgctttatacttgttgtgctactagctcaagagtattggcctggatgtttttagtttgtatattgttaatcattgttttggtttcatgctttgtgactatatccagaatacaatggaataaggatattcaggtattaggacctgtaatagactggaatgttactcaaagagctgtttatcaacccttacagactagaaggattgcacgttcccttagaatgcagcatcctgttccaaaatatgtggaggtaaatatgactagtattccacaaggtgtatactatgaaccccatccggaacccatagtggtgaaggagagggtcctaggtctttctcaaattctgatgattaattcagaaaacattgctaataatgctaatttgacacaagaagtaaagaagttgttaactgaaatggttaatgaagaaatgcaaagtttgtcagatgtaatgattgactttgaaattcctttaggagaccctcgtgatcaagaacaatatatacatagaaaatgctatcaagaatttgcaaattgttatttagtaaaatataaagaacccaaaccgtggcctaaggagggccttatagctgatcaatgcccattaccaggttaccatgctggattaacctataatagacagtctatttgggattactatattaaagtggagagtattagacctgcaaattggacaacaaagagtaaatatggacaagctagactaggaagtttttatattcctagcagcctgagacaaatcaatgttagtcatgtactattctgtagtgatcaattatattctaaatggtataatatagaaaataccatagaacaaaacgagcggtttctgcttaataaactaaataaccttacatctggaacctcagtattgaagaaaagagctcttccgaaggattggagttctcaaggtaaaaatgctctgtttagagaaatcaatgtgttagatatctgcagtaaacctgaatctgtaatactattgaatacttcatactattccttctctttatgggaaggagattgtaattttactaaagatatgatttctcagttggttccagaatgtgatggattttataacaattctaagtggatgcatatgcatccatatgcttgtagattctggagaagtaagaagaatgaaaaagaagaaactaaatgtagagatggggaaactaagagatgtctgtattatcctttatgggacagtcccgaatctacatatgattttggttatttagcataccaaaagaattttccttcccctatctgtatagaacaacagaaaattagagatcaagattatgaagtctattctttgtatcaagaacgcaaaatagcttctaaagcatatggaattgatacagttttattctctctaaagaattttcttaattatacaggaactcctgtaaatgaaatgcctaatgcaagagcttttgtaggcctaatagatcccaagtttcctccttcctatcccaatgttactagggaacattatacttcctgtaataataggaaaagaagaagtgttgataataactatgctaagttaaggtctatggggtatgcacttacaggagcagtgcaaaccttatctcaaatatcagatattaatgatgaaaacttacagcaaggaatatatttattaagggatcatgtaataaccttaatggaagctacattgcatgatatatctgttatggaaggaatgtttgctgtacaacatttgcatacacatttgaatcatttgaagacaatgcttctagaaagaagaatagactggacctatatgtctagtacttggctacaacaacaattacagaaatctgatgatgagatgaaagtaataaagagaattgctagaagtttggtatattatgttaaacaaacccatagttctcccacagctacagcctgggagattggattatattatgaattggttatacctaaacatatttacttgaataattggaatgttgtcaatataggtcacttagttaaatcagctggacaattgactcatgtaactatagctcatccttatgaaataatcaataaggaatgtgtagagactatatatctgcatcttgaggactgcacaagacaagattatgtcatatgtgatgtggtaaagatagtgcagccttgtggcaatagctcagacacgagtgattgtcctgtctgggctgaagctgtaaaagaaccatttgtgcaagtcaatcctctgaaaaacggaagttatctggttttggcaagttccacagactgtcagatcccaccatatgttcctagcatcgtgactgttaatgaaacaacgtcatgctttggactggactttaaaaggccactggttgcggaagaaagattgagctttgagccacgactgccaaatctacaactaagattaccacatttggttggaattattgcaaaaatcaaagggataaaaatagaagtcacatcctctggagaaagtataaaagagcagattgaaagagcaaaagctgagctccttcgactggacattcacgagggagatactcctgcctggatacaacagctagctgcagcaacaaaggacgtctggccagcagcagcttctgctctacaaggaattggtaactttttatctgggactgcccaaggaatatttggaactgcctttagtctcttgggatacttaaagcctatcctaataggagtaggggtcattctcttggttattcttatatttaagattgtatcatggattcctacgaaaaagaagaatcagtag

SEQ ID NO: 260 - DNA, 2031 bp, Artificial Sequence
  pGP41
atgggcgttacaggaatattgcagttacctcgtgatcgattcaagaggacatcattctttctttgggtaattatccttttccaaagaacattttccatcccacttggagtcatccacaatagcacattacaggttagtgatgtcgacaaactagtttgtcgtgacaaactgtcatccacaaatcaattgagatcagttggactgaatctcgaagggaatggagtggcaactgacgtgccatctgcaactaaaagatggggcttcaggtccggtgtcccaccaaaggtggtcaattatgaagctggtgaatgggctgaaaactgctacaatcttgaaatcaaaaaacctgacgggagtgagtgtctaccagcagcgccagacgggattcggggcttcccccggtgccggtatgtgcacaaagtatcaggaacgggaccgtgtgccggagactttgccttccataaagagggtgctttcttcctgtatgatcgacttgcttccacagttatctaccgaggaacgactttcgctgaaggtgtcgttgcatttctgatactgccccaagctaagaaggacttcttcagctcacaccccttgagagagccggtcaatgcaacggaggacccgtctagtggctactattctaccacaattagatatcaggctaccggttttggaaccaatgagacagagtacttgttcgaggttgacaatttgacctacgtccaacttgaatcaagattcacaccacagtttctgctccagctgaatgagacaatatatacaagtgggaaaaggagcaataccacgggaaaactaatttggaaggtcaaccccgaaattgatacaacaatcggggagtgggccttctgggaaactaaaaaaaacctcactagaaaaattcgcagtgaagagttgtctttcacagttgtatcaaacggagccaaaaacatcagtggtcagagtccggcgcgaacttcttccgacccagggaccaacacaacaactgaagaccacaaaatcatggcttcagaaaattcctctgcaatggttcaagtgcacagtcaaggaagggaagctgcagtgtcgcatctaacaacccttgccacaatctccacgagtccccaatccctcacaaccaaaccaggtccggacaacagcacccataatacacccgtgtataaacttgacatctctgaggcaactcaagttgaacaacatcaccgcagaacagacaacgacagcacagcctccgacactccctctgccacgaccgcagccggacccccaaaagcagagaacaccaacacgagcaagagcactgacttcctggaccccgccaccacaacaagtccccaaaaccacagcgagaccgctggcaacaacaacactcatcaccaagataccggagaagagagtgccagcagcgggaagctaggcttaattaccaatactattgctggagtcgcaggactgatcacaggcgggagaagaactcgaagagaagcaattgtcaatgctcaacccaaatgcaaccctaatttacattactggactactcaggatgaaggtgctgcaatcggactggcctggataccatatttcgggccagcagccgagggaatttacatagaggggctaatgcacaatcaagatggtttaatctgtgggttgagacagctggccaacgagacgactcaagctcttcaactgttcctgagagccacaactgagctacgcaccttttcaatcctcaaccgtaaggcaattgatttcttgctgcagcgatggggcggcacatgccacattctgggaccggactgctgtatcgaaccacatgattggaccaagaacataacagacaaaattgatcagattattcatgattttgttgataaaacccttccggaccagggggacaatgacaattggtggacaggatggagacaatggataccggcaggtattggagttacaggcgttataattgcagttatcgctttattctgtatatgcaaatttgtcttttag

SEQ ID NO: 261 - DNA, 1485 bp, Artificial Sequence
  pGP25
atgcggtgcgtgggaataggaaacagagacttcgtggaaggactgtcaggagctacgtgggtggatgtagttctggagcatggaagttgcgtcactaccatggcaaaagacaaaccaacactggacattgaactcctgaagacggaggtcacaaaccctgccgtcctgcgcaaactgtgtatagaagctaaaatatcaaataccaccactgactcgagatgtccgacacaaggagaagccacgctggtggaagaacaagacacgaactttgtgtgtcgacgaacattcgtggacagaggctggggcaatggttgtggactattcggaaagggtagcttaataacgtgtgctaagtttaagtgtgtgacaaaattggaaggaaagatagtccaatatgaaaacttaaaatattctgtgatcgttaccgtccacactggagaccagcaccaagttggaaatgagaccacagaacatggaacaattgcaaccataacacctcaagctcccacgtcggaaatacaactgacagactacggagctctaacactggattgttcacctagaacagggctagactttaatgagatggtgttgctgacaatgaaagaaaaatcatggctcgtccacaaacaatggtttctagacttaccactgccttggacctcaggggcctcaacgtcccaagagacttggaacagacaagacttgctggtcacgtttaagacagctcatgcaaagaagcaggaagtagtcgtactaggatcacaagaaggagcaatgcacactgcgttgactggagcgacagaaatccaaacgtctggaacgacaacaatttttgcaggccacctgaaatgcagattaaaaatggacaaactaactctaaaaggaatatcatatgtaatgtgcacaggctcattcaagttagagaaggaagtggctgagacccagcatggaactgttctagtacaggtcaaatacgaaggaacagatgcaccatgcaagatccccttctcgtcccaagatgagaagggagtaacccagaatgggagattggtaacagccaaccccatagtcactgacaaagaaaaaccagtcaacattgaagcggagccaccctttggtgagagctacatcgtggtaggagcaggtgaaaaagctttgaaactaagctggttcaagaagggaagcagtatagggaaaatgtttgaagcaactgcccgtggagcacgaaggatggccatcctgggagacaccgcatgggacttcggctctataggaggagtgttcacgtctgtgggaaaactggtacaccagatctttggaactgcgtatggagttttgttcagcggtgtttcttggaccatgaaaataggaatagggattctgctgacatggctgggattaaactcaaggagcacgtccctttcaatgacgtgtatcgcagttggcatggtcacactgtacctaggagtcatggtccaggcg

SEQ ID NO: 262 - DNA, 1518 bp, Artificial Sequence
  pGP26
atgatcaggtgcataggagtcagcaatagggactttgtggaaggtatgtcaggtgggacttgggttgatgttgtcttggaacatggaggttgtgtcaccgtaatggcacaggacaaaccgactgtcgacatagagctggttacaacaacagtcagcaacatggcggaggtaagatcctactgctatgaggcatcaatatcagacatggcttcggacagccgctgcccaacacaaggtgaagcctaccttgacaagcaatcagacactcaatatgtctgcaaaagaacgttagtggacagaggctggggaaatggatgtggactttttggcaaagggagcctggtgacatgcgctaagtttgcatgctccaagaaaatgaccgggaagagcatccagccagagaatctggagtaccggataatgctgtcagttcatggctcccagcacagtgggatgatcgttaatgacacaggacatgaaactgatgagaatagagcgaaggttgagataacgcccaattcaccaagagccgaagccaccctggggggttttggaagcctaggacttgattgtgaaccgaggacaggccttgacttttcagatttgtattacttgactatgaataacaagcactggttggtccacaaggagtggttccacgacattccattaccttggcacgctggggcagacaccggaactccacactggaacaacaaagaagcactggtagagttcaaggacgcacatgccaaaaggcaaactgtcgtggttctagggagtcaagaaggagcagttcacacggcccttgctggagctctggaggctgagatggatggtgcaaagggaaggctgtcctctggccacttgaaatgtcgcctgaaaatggataaacttagattgaagggcgtgtcatactccttgtgtaccgcagcgttcacattcaccaagatcccggctgaaacactgcacgggacagtcacagtggaggtacagtacgcagggacagatggaccttgcaaggttccagctcagatggcggtggacatgcaaactctgaccccagttgggaggttgataaccgctaaccccgtaatcactgaaagcactgagaactctaagatgatgctggaacttgatccaccatttggggactcttacattgtcataggagtcggggagaagaagatcacccaccactggcacaggagtggcagcaccattggaaaagcatttgaagccactgtgagaggtgccaagagaatggcagtcttgggagacacagcctgggactttggatcagttggaggcgctctcaactcattgggcaagggcatccatcaaatttttggagcagctttcaaatcattgtttggaggaatgtcctggttctcacaaatcctcattggaacgttgctgatgtggttgggtctgaacacaaagaatggatctatttcccttatgtgcttggccttagggggagtgttgatcttcttatccacagccgtctctgcttag

SEQ ID NO: 263 - DNA, 1284 bp, Artificial Sequence
  pGP27
atgttcaactgccttggaatgagcaacagagacttcttggaaggagtgtctggagcaacatgggtggatttggttctcgaaggcgacagctgcgtgactatcatgtctaaggacaagcctaccatcgatgtgaagatgatgaatatggaggcggccaacctggcagaggtccgcagttattgctatttggctaccgtcagcgatctctccaccaaagctgcgtgcccgaccatgggagaagctcacaatgacaaacgtgctgacccagcttttgtgtgcagacaaggagtggtggacaggggctggggcaacggctgcggactatttggcaaaggaagcattgacacatgcgccaaatttgcctgctctaccaaggcaataggaagaaccatcttgaaagagaatatcaagtacgaagtggccatttttgtccatggaccaactactgtggagtcgcacggaaactactccacacaggttggagccactcaggcagggagattcagcatcactcctgcggcgccttcatacacactaaagcttggagaatatggagaggtgacagtggactgtgaaccacggtcagggattgacaccaatgcatactacgtgatgactgttggaacaaagacgttcttggtccatcgtgagtggttcatggacctcaacctcccttggagcagtgctggaagtactgtgtggaggaacagagagacgttaatggagtttgaagaaccacacgccacgaagcagtctgtgatagcattgggctcacaagagggagctctgcatcaagctttggctggagccattcctgtggaattttcaagcaacactgtcaagttgacgtcgggtcatttgaagtgtagagtgaagatggaaaaattgcagttgaagggaacaacctatggcgtctgttcaaaggctttcaagtttcttgggactcccgcagacacaggtcacggcactgtggtgttggaattgcagtacactggcacggatggaccttgcaaagttcctatctcgtcagtggcttcattgaacgacctaacgccagtgggcagattggtcactgtcaacccttttgtttcagtggccacggccaacgctaaggtcctgattgaattggaaccaccctttggagactcatacatagtggtgggcagaggagaacaacagatcaatcaccattggcacaagtctggaagcagcattggcaaagcctttacaaccaccctcaaaggagcgcagagactagccgctctaggagacacagcttggtag

SEQ ID NO: 264 - DNA, 1506 bp, Artificial Sequence
  pGP28
atgttcaactgtctgggaatgggcaatcgtgacttcatagaaggagccagtggagccacttgggtggacttggtgctagaaggagatagctgcttgacaatcatggcaaacgacaaaccaacattggacgtccgcatgattaacatcgaagctagtcaacttgctgaggtcagaagttactgctatcatgcttcagtcactgacatctcgacggtggctcggtgccccacgactggagaagcccacaacgagaagcgagctgatagtagctatgtgtgcaaacaaggcttcactgatcgtgggtggggcaacggatgtggactcttcgggaaggggagcattgacacatgtgcaaaattctcctgcactagcaaagcgattgggagaacaatccagccagaaaacatcaaatacgaagttggcatttttgtgcatggaaccaccacttcagaaaaccatgggaattattcagcgcaagttggggcttcccaggcggcaaagtttacagtaacacccaatgctccttcgataaccctcaaacttggtgactacggagaagtcacgctggactgtgagccaaggagtggactgaacactgaagcgttttacgtcatgaccgtggggtcaaagtcatttctggtccatagggaatggtttcatgacctcgctctcccctggacgtctccttcgagcacagcgtggagaaacagagaactcctcatggaatttgaagaagcgcacgccacaaaacagtccgttgttgctcttgggtcacaggaaggaggcctccatcaggcgctggcaggggccattgtggtggagtactcaagctcagtaaagctaacatcaggccacctgaaatgcaggctaaaaatggacaaactggccctgaaaggcacaacctatggcatgtgtacaggaaaattctcgttcgcgaaaaatccggcggacactggccacggaacagttgtcattgaactctcctactctgggagagacggcccctgcaaaattccgattgtctccgttgcgagccttaatgacatgactcccgttgggcggctggtgacagtgaaccctttcgtcgcgacttccagtgctaactcaaaggtgctggtcgagatggaaccccctttcggagactcctacatcgtggttgggaggggagacaagcagattaaccaccattggcacaaagctggaagcacgctaggcaaggccttttcaacaactttgaagggggctcaaaggctggcagcgttgggcgacacagcctgggactttggctctattggaggggtcttcaactccataggaaaagccgtccaccaagtgtttggtggtgccttcagaacactcttcgggggaatgtcttggatcacacaagggctaatgggtgccctactgctttggatgggcgtcaacgcacgagaccgatcaattgctctggccttcttagccacaggaggtgtgctcgtgttcttagcgaccaatgtgcatgcttag

SEQ ID NO: 265 - DNA, 1666 bp, Artificial Sequence
  pGP31.1
gcaaagcacgtgagatcgccaccatgaaagtcttcctcgtgacctgtcttggcttcgccgtgttcagcagttctgtgtgtgtgaatatcaacatactgcagcagatcggctatatcaaacaacaagtgaggcagctctcctattactctcagagtagcagctcttacattgtcgttaagctgctccccaatattcaaccaacagacaatagttgtgagtttaagtcagtaacgcaatataacaaaactctgtctaacctcttgctccctatagccgagaacattaataacattgcatcaccatcatctggaagcagaaggcataaacgcttcgctgggattgccataggcattgcggccctcggcgtggcgacagctgcccaagtaaccgcggctgtcagcctcgttcaagcccagaccaatgccagagctatcgctgcgatgaagaatagcatccaggccactaaccgagcagtcttcgaagttaaggaaggcacacagcggcttgccatcgcggtacaagccattcaagatcatattaacacaattatgaatactcaactgaataacatgtcatgtcagatccttgataaccaactggctacatctctgggcttgtacctgaccgagctgaccactgtctttcagccccaactgatcaaccctgccctgtcacctatcagcattcaagcactcaggtcacttcttgggtccatgactcccgctgtcgtgcaagctacactctcaacatccatctctgcagccgaaattctgtccgctggcctcatggaaggccaaattgtgagcgttctcctcgatgagatgcagatgatagtcaaaattaacattcctaccatagtgacgcaatcaaacgcactcgtaatcgacttttacagtatctctagcttcattaataaccaagaatctatcatccaattgccagatcggatccttgaaatcggaaatgaacagtggagttatcctgcgaagaactgtaaattgacgagacaccacatcttctgtcaatacaatgaggccgaaagactcagcctcgaatctaaactctgcttggcaggcaatatcagcgcctgtgtattcagccctatcgcagggtcttatatgcggcgctttgtagcactcgacggaacaatagtcgctaactgccgatcattgacctgtctgtgcaagagccccagctaccctatttatcaacccgaccaccatgctgttactacgattgacctcactgcgtgccagaccttgagcctcgatgggctcgattttagtatagtctctctgagtaatataacatatgctgaaaacttgacaatcagcctgagtcagactatcaacactcagcccattgatatttccacggaacttagtaaagtaaacgccagcctgcaaaacgcagttaaatatataaaggaatccaatcatcaactccaaagcgtaaacgttaatagcaaaataggcgccatcattgtggctgcactggtcctctcaatcctgtcaatcattatcagccttttgttctgttgctgggcttacgtagccactaaagagatcaggcggatcaacttcaaaacgaaccacattaacacaatttcatctagcgtcgatgatctcatccggtacttataagatctgaattcaccccaccagtg

SEQ ID NO: 266 - DNA, 1798 bp, Artificial Sequence
  pGP31.2
gcaaagcacgtgagatcgccaccatggaacctagtaagcttttcaccatgtccgataatgctacattcgcaccaggccccgtcattaacgcagccgacaagaaaacattccgtacatgtttccgcattctggtcctgtcagtccaggcagtcactcttattctggtaattgttactctgggcgaactcgttcgcatgattaacgaccagggactgtctaaccagctctcctctattgccgataagatcagagagtccgccaccatgatcgcatcagcagtcggagtgatgaatcaagtgattcatggggtgacagtttcactgccactccaaatagaaggaaatcaaaatcagcttctctcaactcttgccacgatttgcacaggaaagaagcaggtttctaactgttctactaacataccattggtgaatgatctgcggtttattaatgggatcaataagttcatcattgaagactatgctacgcatgacttcagcattggccacccgctgaatatgcctagttttatcccaacagccacaagccccaatggttgcacccggattccgtcctttagcttggggaaaacccattggtgctatacccacaatgttattaacgctaattgcaaagatcatacatcttccaatcaatacattagcatgggcatccttgtacaaacggcctcaggctatcccatgtttaaaactctgaaaatacaatatctgagcgatggcctgaacaggaagagttgctctatcgcaaccgtgcctgatgggtgcgcaatgtactgttatgtgagtacccaacttgaaaccgatgactatgcaggctcttctccccctacccagaaactgacactgctgttctataacgatactgttacggagcgtaccataagccccactggacttgaaggtaattgggctacccttgtgcctggagtaggatccggtatctactttgagaataagctcatattccctgcgtatggcggggtgctgcccaacagttctctcggcgtcaagagtgcacgcgagttcttcagaccagtgaacccctataatccctgctcagggccccaacaagacttggatcagcgcgcacttagatcctattttccttcctattttagtaatcgtcgagtccagagcgctttcctcgtgtgtgcttggaatcagattttggtaacaaactgtgaactggtcgtcccatccaataatcaaacccttatgggagcagaagggcgggtcctgcttattaacaaccgactgctctactaccaaagaagcacaagttggtggccatacgaacttctctatgaaatttccttcacattcaccaacagtggtcagagctcagtgaatatgagttggatacccatatatagctttacacgacctggatcaggcaactgtagcggggaaaatgtttgtcctacagcatgtgtaagtggcgtttatctggatccgtggccgcttaccccatactcccatcaatccggtattaaccgaaatttctatttcactggcgcactcttgaacagtagtacgacaagagtaaaccccaccctgtacgtttcagctttgaacaatcttaaggtgctggctccatatggaaatcagggtctgtttgcttcctacactactacaacatgtttccaagataccggagatgcctctgtatattgtgtgtatatcatggaactggcgtcaaacatcgtcggcgaatttcaaatattgcccgtcctgactcggctgacaataaccttataagatctgaattcaccccaccagtg

SEQ ID NO: 267 - DNA, 1747 bp, Artificial Sequence
  pGP33.1
gcaaagcacgtgagatcgccaccatgactgcatacattcaaagaagccaatgcattagcacaagtctccttgtggtgctgacgaccctcgtttcctgtcagatcccgcgtgatcgactttccaatatcggggttattgtcgacgagggcaagtccttgaaaatcgcaggttcccacgagtctaggtacatcgtgctgtcactggttcccggcgtcgactttgagaatggttgcggtacagcccaagtaattcagtacaagagcctgctcaacaggcttctgatccctctccgagatgccttggatctgcaagaagctctgattactgtgacgaacgacacgactcaaaatgccggggctccacagtctcgcttcttcggcgcagtgatcggcacgatcgctctgggcgttgccacttccgctcagatcaccgctggtattgcccttgctgaagctcgggaagccaaacgtgatattgcgctgataaaggagagcatgacaaagactcataagtcaatcgaactgcttcagaacgccgtgggagagcaaattcttgctctcaaaaccctgcaggacttcgtgaatgatgagattaaaccagccatcagtgaactgggttgcgagactgctgctctgcgtctgggaattaaactgacccaacattactccgagctcctcactgctttcggctctaactttggaacgattggagagaaaagcctgacccttcaggctctctcttctctctactccgccaacatcacagagattatgacgacgatcaaaacggggcaatccaacatttatgatgtcatttatactgagcagatcaaaggtaccgtgatcgatgttgacctggaaaggtacatggtgacactctcagtcaaaatccccatcctcagtgaggtgccaggcgtattgattcataaagcaagcagcattagctataacatagatggggaagagtggtacgttaccgtccccagtcatatactgtctagagccagtttcctcggtggtgcagatataaccgactgtgtggagagccggctgacctatatttgtccgcgcgatcccgcacaattgattccagacagccagcaaaagtgcatcctcggggacaccacacgatgtcctgttacgaaggtagtcgactcactgatccccaagttcgccttcgtcaacggtggcgtagttgccaattgcattgccagcacttgtacatgtggcacaggacgcagacctattagccaagatcgttcaaagggcgtggttttcctcacacacgataattgcggactgataggggtgaacggtgttgaactttacgctaaccgcagaggacacgatgcaacatggggcgtacagaatttgacagtcgggcctgcaattgcaatacgtcctatcgacatctctctcaacctggcggacgctaccaattttctgcaagactccaaggctgaacttgagaaagcgaggaagattctgtccgaagtcggccgatggtataactctcgggaaactgtcattaccatcattgtcgtgatggttgtcattttggtggtgatcattgtgataattattgtcctctataggctgaggagatctatgctgatgggtaacccggatgacagaatcccacgcgacacgtacacccttgagccgaaaattcggcatatgtatacgaatggtggatttgatgcaatggcggaaaagcgcttataagatctgaattcaccccaccagtg

SEQ ID NO: 268 - DNA, 1777 bp, Artificial Sequence
  pGP33.2
gcaaagcacgtgagatcgccaccatggatggcgaccgaggcaaacgcgactcttattggagcacttcccctagtgggtccaccactaagccggctagcggatgggagagatcaagtaaggccgatacgtggctcttgatcttgagcttcacccaatgggctttgagtattgctactgttattatttgcatcatcatctcagctcggcaaggatactctatgaaagagtacagcatgacggtggaagcattgaatatgtcttctcgggaagtgaaggaatcactcacatctttgattaggcaggaagtcatagcccgggctgtgaatatccaatccagcgtccaaacagggatcccggtgctcctgaacaagaactcccgagacgtcatccaaatgatcgataaatcttgttcacgccaagaacttacccaacattgtgaaagcactattgccgtccatcacgcagacggcattgcacccctggagccgcactcattctggcgttgcccggttggtgaaccctatctgtcatctgaccccgagatcagtctgctccctggaccttcactcctctccggttccaccacgataagcgggtgtgtcaggttgccatccctctccatcggggaagcgatttatgcgtatagcagcaacttgattacgcaaggctgtgctgacatcggtaagtcctaccaggtgcttcagcttggttatatcagccttaattctgatatgtttccggacctcaatcctgtggtctcacatacatatgacatcaatgacaacagaaaatcctgtagcgtagtcgcaacagggacgagagggtatcaactctgttctatgcctacagtcgacgagagaactgattatagctcagacggaatcgaagatctcgtcctggacgttctcgatttgaaaggtcgcacaaaatcacaccgctacagaaattccgaggtggacctcgatcatcctttctccgcgttgtatcctagtgtgggcaacggcattgctactgaaggctccttgattttcctcgggtacggcggcctcaccacacccttgcaaggtgatacaaaatgccgtacgcaaggctgccaacaggtttctcaagatacttgcaacgaggctctgaagataacttggcttggcgggaaacaagtggtttctgtgatcattcaggtcaatgattacctgagtgaaaggcctaaaattagggtcaccaccattcccattacccaaaactatctcggtgctgagggcaggctgttgaagctcggtgatcgggtctatatatatactcggagcagtggttggcactctcaactgcaaataggggtcttggacgtgtcccacccgttgaccattaattggacacctcatgaggcgctgtcacggccagggaataaagaatgcaactggtacaataagtgccccaaagaatgtatctccggggtctacacagacgcttaccccctgtctccagatgctgctaatgtcgctacagttactctgtacgccaatacttctagagtgaaccccactattatgtattccaacacgaccaatataatcaatatgcttcggataaaagatgtacaacttgaagccgcttacactactacgtcctgtataacacactttgggaaaggctattgctttcacatcattgagattaatcaaaagagtctgaatactctccaacccatgctgtttaaaacatcaatcccaaaattgtgtaaagcggaaagtttataagatctgaattcaccccaccagtg

SEQ ID NO: 269 - DNA, 1590 bp, Artificial Sequence
  pGP59
atgctgctcgtgaaccagagccaccagggcttcaacaaggagcatacatccaaaatggtgtccgccatcgtgctgtacgtgctgctggccgccgctgcccacagcgcttttgccgccgagcattgtaatgctcagatgaaaaccggcccttacaagatcaagaacctggacatcacccctcctaaggagacactgcaaaaagacgtggaaatcaccatcgtggaaaccgactacaatgagaacgtgatcatcggatataagggctactaccaggcctacgcctacaacggcggaagcctggatcctaacaccagagtggaagagaccatgaagaccctgaacgtgggaaaggaagatctgctgatgtggagcatccggcaacagtgtgaagtgggcgaagagctgattgatagatggggctcagattctgacgattgcttcagagacaacgagggcagaggccagtgggtgaagggcaaggagctggtcaagcggcagaacaacaaccacttcgcccatcacacatgcaacaaaagctggcggtgcggcatctccacctctaagatgtattctagactggaatgtcaggacgacaccgacgagtgccaggtgtacatcctggacgctgaaggaaaccctatcaacgtgacagttgacaccgtgctgcaccgggacggcgtgtctatgatcctgaagcagaagagcacattcaccaccagacagatcaaggccgcatgcctgcttatcaaagacgacaagaacaaccccgagagcgtgaccagagaacactgcctgatcgacaacgacatctacgacctgagcaagaatacttggaactgtaaattcaacaggtgcatcaagcggaaggtggagcacagagtgaagaagcgtccaccaacctggcgccacaacgtcagagccaagtacacagagggcgacacagccacaaagggagatctgatgcacatccaggaggaactgatgtacgagaatgacctgcttaaaatgaacatcgagctgatgcacgcccacatcaacaagctgaacaacatgctgcacgacctgatcgttagcgtggccaaggtggacgagagactgatcggcaatctgatgaacaacagcgtgtccagcaccttcctgtctgatgacacctttctgctcatgccttgcaccaacccccccgcccacaccagcaactgctacaacaacagcatctacaaggaaggcagatgggtcgctaataccgatagcagtcagtgcatcgacttcagcaattacaaggagctggccatcgacgatgatgtggagttctggattcctacaattggcaacacaacctaccacgatagctggaaggacgccagcggatggtcttttatcgcccagcagaaaagcaatctgatcaccaccatggaaaataccaagttcggcggcgtgggtacatctctgagcgacatcacaagcatggccgagggcgagctggccgccaagctgaccagcttcatgttcggccacgtcgtgaacttcgtgatcatcctgatcgtgattctgttcctgtactgcatgatcagaaaccggaacagacaatac

SEQ ID NO: 270 - DNA, 2955 bp, Artificial Sequence
  pGP54
atgtctgccgcgctgatgatgtgtatccttgccaacacctctttcccctgctcatcacctccctgctacccctgctgctacgaaaaacagccagaacagacactgcggatgctggaagacaatgtgaatagaccagggtactatgagctactggaagcgtccatgacatgcagaaacagatcacgccaccgccgtagtgtaacagagcacttcaatgtgtataaggctactagaccgtacttagcgtattgcgctgactgtggggacgggtacttctgctatagcccagttgctatcgagaagatccgagatgaggcgcctgacggcatgctcaagatccaagtctccgcccaaataggtctggacaaggcaggtacccacgcccacacgaagatccgatatatggctggtcatgatgttcaggaatctaagagagactccttgagggtgtacacgtccgcagcgtgctctatacatgggacgatgggacacttcatcgtcgcacattgtccgccaggcgactacctcaaggtttcgttcgaggacgcagattcacacgtgaaggcatgtaaggtccaatacaagcacgacccattgccggtgggtagagagaagttcgtggttagaccccactttggcgtagagctgccatgcacctcataccagctgacaacagctcccaccgacgaggagatcgacatgcacacaccgccagatataccggatcgcaccctgctatcacagacggcgggcaacgtcaaaataacagcaggcggcaggactatcaggtacaattgtacctgtggccgtgacaacgtaggcactaccagtactgacaagaccatcaacacatgcaagattgaccaatgccatgctgccgttaccagccatgacaaatggcaatttacctctccatttgttcccagggctgatcagacagctaggaggggcaaagtgcatgttccattccctttgactaacgtcacctgccgagtgccgttggctcgagcgccggatgtcacctatggtaagaaggaggtgaccctgagattacacccagatcatccgacgctcttctcctataggagtttaggagccgaaccgcacccgtacgaggagtgggttgacaagttctctgagcgcatcatcccagtgacggaagaagggattgagtaccagtggggcaacaacccgccggtccgcctatgggcgcaactgacgaccgagggcaaaccccatggctggccacatgaaatcattcagtactattatggactataccccgccgccaccattgccgcagtatccggggcgagtctgatggccctcctaactctagcggccacatgctgcatgctggccaccgcgaggagaaagtgcctaacaccatacgccttgacgccaggagcggtggtaccgttgacactggggctgctttgctgcgcaccgagggcgaacgcagcatcattcgctgagactatggcatatctgtgggacgagaacaaaaccctcttttggatggaattcgccgccccagccgcagcgcttgctttgctggcatgctgtatcaaaagcctgatctgctgttgtaagccattttcttttttagtgttactgagcctgggagcctccgcaaaagcttacgagcacacagccacaattccgaatgtggtggggttcccgtataaggctcacattgaaaggaatggcttctcgcccatgactctgcagcttgaagtggtggagacaagctgggaacccacacttaacctggagtacattacctgcgaatacaagacggtggtcccttcgccattcatcaaatgttgcggaacatcagaatgctcatccaaggagcagccagactaccaatgcaaggtgtacacgggtgtatacccattcatgtggggtggagcctactgtttctgcgactccgagaacacgcagctcagcgaggcctatgtcgacaggtcagacgtttgcaaacatgatcacgcatcggcctacaaggcacacacggcctctctaaaagcaacaatcaggatcagttatggcaccatcaaccagaccaccgaggccttcgttaatggtgaacacgcggtcaacgtgggcggaagcaagttcatctttggaccgatctcaacagcttggtcaccgttcgacaataaaattgtcgtgtataaagatgatgtctacaaccaggacttcccaccctacggatcaggccagccgggtagattcggagacattcagagcaggacagtggagagcaaagacttgtatgccaacacggccctaaaactctcaagaccatcacccggggttgtgcatgtgccatacacgccgacaccatccggatttaaatattggctgaaggagaaaggatcttcattgaatacaaaggccccttttggctgcaagataaagaccaatccagtcagagccatggattgtgcagttggcagtatacctgtgtcgatggacatacctgacagtgcattcacacgagtggtagatgccccggctgtaacagacctgagctgccaggtagtggtctgtacacactcctccgatttcggaggagttgccacattgtcttacaaaacggacaaacccggcaagtgcgctgtccactcacattccaacgtcgcaacgttgcaagaggcgacggtggatgtcaaggaggatggcaaggtcacagtgcacttttccacggcgtccgcctccccggccttcaaagtgtccgtctgtgacgcaaaaacaacgtgcacggcggcgtgcgagcctccaaaagaccacatcgtcccttatggggcgagccataacaaccaggtctttccggacatgtcaggaactgcgatgacgtgggtgcagaggctggccagtgggttaggtgggctggctctcatcgcggtggttgtgctggtcttggtaacctgcataacaatgcgtcgg

SEQ ID NO: 271 - DNA, 1407 bp, Artificial Sequence
  pGP82
atgaatcctaatcagaaaatcattaccatcggtagcatctgcatgatcgtgggcattatcagcctgatcctgcagatcggcaacatcatcagcatctgggtgtcccacagcatccagaccggaaatcagaaccaacctgagatctgcaaccagagcatcattacatacgagaacaacacatgggtcaaccaaacatacgtgaacatcagcaacaccaacttcgtgaccgagcaggccctggctcctgtggccctggccggcaacagcagcctgtgccccatttcaggatgggccatctacagcaaggacaacggcatccggatcggaagcaagggcgatgtgttcgtgatccgcgagcctttcatctcttgcagccatctggaatgtagaacttttttcctgacccagggcgccctgctgaatgataagcactctaatgggaccgtgaaagacagaagcccttatagaaccctgatgagctgtcctatcggcgaaagcccttctccttacaacagcagattcgagagcgtggcttggtccgcctctgcttgtcacgacggcatcggctggctgaccatcggcatcagcggtccagataacggcgctgtggccgttctgaagtacaacggcatcatcacagatacaatcaagagctggcggaacaacatcctgcggacacaggagagcgagtgcgcctgtatgaacggctcctgctttaccatcatgaccgatggccctagcaacggccaggccagctacaagatcttcaagatcgagaagggcaaggtggtgaaaagcgtcgagctgaacgcccctaactaccactacgaggaatgcagctgttaccctgacgccggagaaatcatgtgcgtgtgccgggacaactggcacggcagcaatagaccctgggttagcttcaaccagaacctggagtaccagatcggctacatctgtagtggggtgttcggcgacaaccccagacctaatgacggcgcaggcagctgcggccccgtgagcagcaacggagcctacggagtgaagggattctcctttaagtacggcaaaggagtgtggatcggcagaaccaagtcaacaagcagcagatctggcttcgagatgatctgggaccccaacggctggaccgaaaccgacagcagcttcagcgtgaagcaggacattgtggccatcaccgactggtccggatattctggctctttcgtccagcaccctgaactgacaggcctggactgcatgagaccatgcttctgggtggaactgatcaggggccggcccaaggaaaacaccatctggaccagcggctctagcatcagcttttgcggcgtgaatagtgatacagtgggctggagctggcctgatggcgccgagctccccttcaccatcgacaag

SEQ ID NO: 272 - DNA, 1485 bp, Artificial Sequence
  pGP75
atgaggtgcatcggcatcagcaacagggacttcgtggagggcgtgagcggcggcagctgggtggacatcgtgctggagcacggcagctgcgtgaccaccatggccaagaacaagcccaccctggacttcgagctgatcaagaccgaggccaagcaccccgccaccctgaggaagtactgcgtggaggccaagctgaccaacaccaccaccgccagcaggtgccccacccagggcgagcccagcctgaacgaggagcaggacaagaggttcgtgtgcaagcacagcatggtggacaggggctggggcaacggctgcggcctgttcggcaagggcggcatcgtgacctgcgccatgttcacctgcaagaagaacatggagggcaaggtggtgcagcccgagaacctggagtacaccatcgtgatcaccccccacagcggcgaggagaacgccgtgggcaacgacaccggcaagcacggcaaggagatcaaggtgaccccccagagcagcatcaccgaggccgagctgaccggctacggcaccgtgaccatggagtgcagccccaggaccggcctggacttcaacgagatggtgctgctgcagatggagaacaaggcctggctggtgcacaggcagtggttcctggacctgcccctgccctggctgcccggcgccgacacccagggcagcaactggatccagaaggagaccctggtgaccttcaagaacccccacgccaagaagcaggacgtggtggtgctgggcagccaggagggcgccatgcacaccgccctgaccggcgccaccgagatccagatgagcagcggcaacctgctgttcaccggccacctgaagtgcaggctgaggatggacaagctgcagctgaagggcatgagctacagcatgtgcaccggcaagttcaaggtggtgaaggagatcgccgagacccagcacggcaccatcgtgatcagggtgcagtacgagggcgacggcagcccctgcaagatccccttcgagatcatggacctggagaagaggcacgtgctgggcaggctgatcaccgtgaaccccatcgtgaccgagaaggacagccccgtgaacatcgaggccgagccccccttcggcgacagctacatcatcatcggcgtggagcccggccagctgaagctgagctggttcaagaagggcagcagcatcggccagatgttcgagaccaccatgaggggcgccaagaggatggccatcctgggcgacaccgcctgggacttcggcagcctgggcggcgtgttcaccagcatcggcaaggccctgcaccaggtgttcggcgccatctacggcgccgccttcagcggcgtgagctggaccatgaagatcctgatcggcgtggtgatcacctggatcggcatgaacagcaggagcaccagcctgagcgtgagcctggtgctggtgggcgtggtgaccctgtacctgggcgtgatggtgcaggcc

SEQ ID NO: 273 - DNA, 1479 bp, Artificial Sequence
  pGP76
atgaggtgcgtgggcgtgggcaacagggacttcgtggagggcctgagcggcgccacctgggtggacgtggtgctggagcacggcggctgcgtgaccaccatggccaagaacaagcccaccctggacatcgagctgcagaagaccgaggccacccagctggccaccctgaggaagctgtgcatcgagggcaagatcaccaacatcaccaccgacagcaggtgccccacccagggcgaggccatcctgcccgaggagcaggaccagaactacgtgtgcaagcacacctacgtggacaggggctggggcaacggctgcggcctgttcggcaagggcagcctggtgacctgcgccaagttccagtgcctggagagcatcgagggcaaggtggtgcagcacgagaacctgaagtacaccgtgatcatcaccgtgcacaccggcgaccagcaccaggtgggcaacgagacccagggcgtgaccgccgagatcaccagccaggccagcaccgccgaggccatcctgcccgagtacggcaccctgggcctggagtgcagccccaggaccggcctggacttcaacgagatgatcctgctgaccatgaagaacaaggcctggatggtgcacaggcagtggttcttcgacctgcccctgccctggaccagcggcgccaccaccaagacccccacctggaacaggaaggagctgctggtgaccttcaagaacgcccacgccaagaagcaggaggtggtggtgctgggcagccaggagggcgccatgcacaccgccctgaccggcgccaccgagatccagaccagcggcggcaccagcatcttcgccggccacctgaagtgcaggctgaagatggacaagctgaagctgaagggcatgagctacgccatgtgcctgaacaccttcgtgctgaagaaggaggtgagcgagacccagcacggcaccatcctgatcaaggtggagtacaagggcgaggacgccccctgcaagatccccttcagcaccgaggacggccagggcaaggcccacaacggcaggctgatcaccgccaaccccgtggtgaccaagaaggaggagcccgtgaacatcgaggccgagccccccttcggcgagagcaacatcgtgatcggcatcggcgacaaggccctgaagatcaactggtacaggaagggcagcagcatcggcaagatgttcgaggccaccgccaggggcgccaggaggatggccatcctgggcgacaccgcctgggacttcggcagcgtgggcggcgtgctgaacagcctgggcaagatggtgcaccagatcttcggcagcgcctacaccgccctgttcagcggcgtgagctggatcatgaagatcggcatcggcgtgctgctgacctggatcggcctgaacagcaagaacaccagcatgagcttcagctgcatcgccatcggcatcatcaccctgtacctgggcgtggtggtgcaggcc

SEQ ID NO: 274 - DNA, 216 bp, Artificial Sequence
  pGP77
ttcggcagcgtgggcggcctgttcaccagcctgggcaaggccgtgcaccaggtgttcggcagcgtgtacaccaccatgttcggcggcgtgagctggatgatcaggatcctgatcggcttcctggtgctgtggatcggcaccaacagcaggaacaccagcatggccatgacctgcatcgccgtgggcggcatcaccctgttcctgggcttcaccgtg

SEQ ID NO: 275 - DNA, 1647 bp, Artificial Sequence
  pGP34.1
gccaccatggtggtgatcctggataagcggtgctactgtaatctgctgattctgattctcatgatctctgaatgcagcgtaggaatcctgcactacgagaagctgagcaagatcggactggtgaaaggcgtgacccgcaagtacaagatcaaaagcaaccctctgaccaaggacatcgtgatcaagatgatacccaatgtgtccaacatgagccaatgtaccggcagcgtgatggaaaactacaagacccggctgaacggcatcctgaccccaatcaagggcgccctggaaatctacaaaaacaacacccacgacctggtgggcgacgtgcggctggctggcgtgatcatggccggcgtggccatcggcatcgccaccgccgcccagatcaccgccggagtggccctttatgaggccatgaagaacgccgacaacatcaacaagctgaagagtagcatcgagtctacaaacgaggccgtggtgaagctgcaggagacagccgagaaaaccgtctatgtgctgacagctctgcaggactacatcaacaccaatctggtgcctaccatcgacaagatcagctgcaagcagacagagctgagcctggacctggccctgtctaagtacctgagcgacctgctgttcgtcttcggacctaatttgcaggatcctgtgagcaacagcatgaccatccaggccattagccaggcttttggcggcaactacgagacactgctcagaacactgggctacgccacagaagacttcgacgacctgctggaaagcgatagcatcaccggacagatcatctacgtggacctgagcagctactacattatcgtgagagtgtacttccccattctgaccgagatccagcaggcctacatccaggagctgctgcctgtgtccttcaataatgataactcagaatggatcagcatcgtgcccaacttcatcctcgtgcggaacaccctgatcagcaacatcgagatcggcttctgcctgatcaccaagcggagcgtgatctgcaaccaggactacgccacccctatgacaaacaacatgagagagtgcctgaccggcagcacagagaagtgccccagagaactggtcgtgtctagccacgtgccaagattcgctctgtccaatggcgtgctgtttgccaactgcatcagcgtcacctgtcagtgtcagaccaccggcagagccatcagccagagcggcgagcagaccctgctgatgatcgacaatactacatgccctaccgctgtgctgggaaatgtgatcatctccctgggcaagtatctgggttccgttaactacaactccgagggcatcgccatcggccctcctgttttcaccgacaaggtggacatctcctctcagatcagcagcatgaaccagtctctgcaacaaagcaaggattacatcaaggaagctcaaagactgctggacacagtgaaccccagcctgatcagcatgctgagcatgatcatcctgtacgtgctgtctatcgcctctctgtgcatcggcctcatcacatttatcagcttcatcattgttgaaaaaaagagaaacacatacagcagactggaagatagaagggtgcggcctacaagctctggcgatctgtactacatcggcacctga

SEQ ID NO: 276 - DNA, 8527 bp, Artificial Sequence
  pGP34.2
gccaccatgcctgctgagaacaagaaggtgcggttcgagaacacaacctccgataagggaaagatccccagcaaggtgattaagtcttattacggcaccatggacatcaagaagatcaatgaaggcctcctcgacagcaagattctgtccgcctttaacacagtgatcgccctgctgggaagcattgtgatcatcgtcatgaacatcatgatcatccagaactacaccagatctacagataatcaagccgttatcaaggacgccctgcagggcatccagcagcagatcaagggcctggccgacaagatcggcacagaaatcgggcctaaggtgtccctgatcgacaccagcagcaccatcaccatcccagccaacatcggactgctgggtagcaagatctcccagagcacagcctcgattaacgagaacgtgaacgaaaagtgcaagttcaccctgccacctctgaagatccacgagtgcaacataagctgtcctaaccctctgccttttcgggaataccggccccagacagagggagtgagcaatctggtgggcctgccgaacaacatctgcctgcagaaaaccagcaatcaaatcctgaaacctaaactgatctcttatacactgcctgtggtgggccagtctggcacctgtatcaccgaccccctgctggctatggatgagggctacttcgcctacagccatctggaacggatcggctcttgtagcagaggcgtgtccaaacagagaatcatcggcgttggcgaggtcctggatagaggagatgaagtgccttctctgttcatgacaaacgtgtggacccctccaaaccctaacaccgtgtaccactgcagcgccgtgtacaacaacgagttttactacgtgttgtgcgccgtatccaccgtgggcgaccctatcctgaacagcacctactggagcggcagcctgatgatgaccagacttgccgtgaagcctaaaagcaacggcggcggatataaccagcaccagctggctctgagatctatcgagaagggcagatacgacaaggtgatgccctacggcccttctggcatcaagcagggcgacacactgtacttccccgctgtgggtttcctggtgcggaccgagttcaagtacaatgacagcaactgccccatcaccaagtgtcagtactccaaacccgagaactgcagactgtccatgggcatcagacctaatagccactacatcctgaggagcggcctgctgaaatacaacctgtctgacggcgagaatcctaaggtggtgttcatcgagatctctgaccagcgcctgagcatcggaagtcctagcaagatctacgatagcctgggccagcctgtgttctaccaggcgagcttcagctgggacaccatgatcaaattcggcgacgtgctgaccgtgaacccactggtcgtgaactggcgaaacaacacggtgatcagcagacctggccagagccaatgtcccagattcaatacatgccccgaaatctgctgggagggagtgtacaacgacgctttcctcatcgacagaatcaactggatcagcgccggcgtgttcctggacagcaatcagacagccgagaatcccgtgtttacagtgtttaaagataacgaaatcctgtacagagcccagctggccagcgaagataccaacgcccagaagaccatcacaaattgcttcctgctgaagaacaagatctggtgcatctccctggtggaaatctacgacaccggcgataacgtgatccggcctaagctgttcgccgttaagatccccgagcagtgcacctgatctagaagttgtctcctcctgcactgactgactgatacaatcgatttctggatccgcaggcctaatcaacctctggattacaaaatttgtgaaagattgactggtattcttaactatgttgctccttttacgctatgtggatacgctgctttaatgcctttgtatcatgctattgcttcccgtatggctttcattttctcctccttgtataaatcctggttgctgtctctttatgaggagttgtggcccgttgtcaggcaacgtggcgtggtgtgcactgtgtttgctgacgcaacccccactggttggggcattgccaccacctgtcagctcctttccgggactttcgctttccccctccctattgccacggcggaactcatcgccgcctgccttgcccgctgctggacaggggctcggctgttgggcactgacaattccgtggtgttgtcggggaagctgacgtcctttccatggctgctcgcctgtgttgccacctggattctgcgcgggacgtccttctgctacgtcccttcggccctcaatccagcggaccttccttcccgcggcctgctgccggctctgcggcctcttccgcgtcttcgccttcgccctcagacgagtcggatctccctttgggccgcctccccgcctgtctagcttgactgactgagatacagcgtaccttcagctcacagacatgataagatacattgatgagtttggacaaaccacaactagaatgcagtgaaaaaaatgctttatttgtgaaatttgtgatgctattgctttatttgtaaccattataagctgcaataaacaagttaacaacaacaattgcattcattttatgtttcaggttcagggggaggtgtgggaggttttttaaagcaagtaaaacctctacaaatgtggtattggcccatctctatcggtatcgtagcataaccccttggggcctctaaacgggtcttgaggggttttttgtgcccctcgggccggattgctatctaccggcattggcgcagaaaaaaatgcctgatgcgacgctgcgcgtcttatactcccacatatgccagattcagcaacggatacggcttccccaacttgcccacttccatacgtgtcctccttaccagaaatttatccttaaggtcgtcagctatcctgcaggcgatctctcgatttcgatcaagacattcctttaatggtcttttctggacaccactaggggtcagaagtagttcatcaaactttcttccctccctaatctcattggttaccttgggctatcgaaacttaattaagcgatctgcatctcaattagtcagcaaccatagtcccgcccctaactccgcccatcccgcccctaactccgcccagttccgcccattctccgccccatcgctgactaattttttttatttatgcagaggccgaggccgcctcggcctctgagctattccagaagtagtgaggaggcttttttggaggcctaggcttttgcaaaggaggtagccaacatgattgaacaagatggattgcacgcaggttctcccgccgcttgggtggagaggctattcggctatgactgggcacaacagacaatcggctgctctgatgccgccgtgttccggctgtcagcgcaggggcgcccggttctttttgtcaagaccgacctgtccggtgccctgaatgaactccaggacgaggcagcgcggctatcgtggctggccacgacgggcgttccttgcgcagctgtgctcgacgttgtcactgaagcgggaagggactggctgctattgggcgaagtgccggggcaggatctcctgtcatctcaccttgctcctgccgagaaagtatccatcatggctgatgcaatgcggcggctgcatacgcttgatccggctacctgcccattcgaccaccaagcgaaacatcgcatcgagcgagcacgtactcggatggaagccggtcttgtcgatcaggatgatctggacgaagagcatcaggggctcgcgccagccgaactgttcgccaggctcaaggcgcggatgcccgacggcgaggatctcgtcgtgacccacggcgatgcctgcttgccgaatatcatggtggaaaatggccgcttttctggattcatcgactgtggccggctgggtgtggcggaccgctatcaggacatagcgttggctacccgtgatattgctgaagagcttggcggcgaatgggctgaccgcttcctcgtgctttacggtatcgccgctcccgattcgcagcgcatcgccttctatcgccttcttgacgagttcttctagtatgtaagccctgtgccttctagttgccagccatctgttgtttgcccctcccccgtgccttccttgaccctggaaggtgccactcccactgtcctttcctaataaaatgaggaaattgcatcgcattgtctgagtaggtgtcattctattctggggggtggggtggggcaggacagcaagggggaggattgggaagacaatagcaggcatgctggggatgcggtgggctctatggttaattaaccagtcaagtcagctacttggcgagatcgacttgtctgggtttcgactacgctcagaattgcgtcagtcaagttcgatctggtccttgctattgcacccgttctccgattacgagtttcatttaaatcatgtgagcaaaaggccagcaaaaggccaggaaccgtaaaaaggccgcgttgctggcgtttttccataggctccgcccccctgacgagcatcacaaaaatcgacgctcaagtcagaggtggcgaaacccgacaggactataaagataccaggcgtttccccctggaagctccctcgtgcgctctcctgttccgaccctgccgcttaccggatacctgtccgcctttctcccttcgggaagcgtggcgctttctcatagctcacgctgtaggtatctcagttcggtgtaggtcgttcgctccaagctgggctgtgtgcacgaaccccccgttcagcccgaccgctgcgccttatccggtaactatcgtcttgagtccaacccggtaagacacgacttatcgccactggcagcagccactggtaacaggattagcagagcgaggtatgtaggcggtgctacagagttcttgaagtggtggcctaactacggctacactagaagaacagtatttggtatctgcgctctgctgaagccagttaccttcggaaaaagagttggtagctcttgatccggcaaacaaaccaccgctggtagcggtggtttttttgtttgcaagcagcagattacgcgcagaaaaaaaggatctcaagaagatcctttgatcttttctacggggtctgacgctcagtggaacgaaaactcacgttaagggattttggtcatgagattatcaaaaaggatcttcacctagatccttttaaattaaaaatgaagttttaaatcaatctaaagtatatatgagtaaacttggtctgacagttaccaatgcttaatcagtgaggcacctatctcagcgatctgtctatttcgttcatccatagttgcatttaaatttccgaactctccaaggccctcgtcggaaaatcttcaaacctttcgtccgatccatcttgcaggctacctctcgaacgaactatcgcaagtctcttggccggccttgcgccttggctattgcttggcagcgcctatcgccaggtattactccaatcccgaatatccgagatcgggatcacccgagagaagttcaacctacatcctcaatcccgatctatccgagatccgaggaatatcgaaatcggggcgcgcctggtgtaccgagaacgatcctctcagtgcgagtctcgacgatccatatcgttgcttggcagtcagccagtcggaatccagcttgggacccaggaagtccaatcgtcagatattgtactcaagcctggtcacggcagcgtaccgatctgtttaaacctagatattgatagtctgatcggtcaacgtataatcgagtcctagcttttgcaaacatctatcaagagacaggatcagcaggaggctttcgcatgagtattcaacatttccgtgtcgcccttattcccttttttgcggcattttgccttcctgtttttgctcacccagaaacgctggtgaaagtaaaagatgctgaagatcagttgggtgcgcgagtgggttacatcgaactggatctcaacagcggtaagatccttgagagttttcgccccgaagaacgctttccaatgatgagcacttttaaagttctgctatgtggcgcggtattatcccgtattgacgccgggcaagagcaactcggtcgccgcatacactattctcagaatgacttggttgagtattcaccagtcacagaaaagcatcttacggatggcatgacagtaagagaattatgcagtgctgccataaccatgagtgataacactgcggccaacttacttctgacaacgattggaggaccgaaggagctaaccgcttttttgcacaacatgggggatcatgtaactcgccttgatcgttgggaaccggagctgaatgaagccataccaaacgacgagcgtgacaccacgatgcctgtagcaatggcaacaaccttgcgtaaactattaactggcgaactacttactctagcttcccggcaacagttgatagactggatggaggcggataaagttgcaggaccacttctgcgctcggcccttccggctggctggtttattgctgataaatctggagccggtgagcgtgggtctcgcggtatcattgcagcactggggccagatggtaagccctcccgtatcgtagttatctacacgacggggagtcaggcaactatggatgaacgaaatagacagatcgctgagataggtgcctcactgattaagcattggtaaccgattctaggtgcattggcgcagaaaaaaatgcctgatgcgacgctgcgcgtcttatactcccacatatgccagattcagcaacggatacggcttccccaacttgcccacttccatacgtgtcctccttaccagaaatttatccttaagatcccgaatcgtttaaactcgactctggctctatcgaatctccgtcgtttcgagcttacgcgaacagccgtggcgctcatttgctcgtcgggcatcgaatctcgtcagctatcgtcagcttacctttttggcagcgatcgcggctcccgacatcttggaccattagctccacaggtatcttcttccctctagtggtcataacagcagcttcagctacctctcaattcaaaaaacccctcaagacccgtttagaggccccaaggggttatgctatcaatcgttgcgttacacacacaaaaaaccaacacacatccatcttcgatggatagcgattttattatctaactgctgatcgagtgtagccagatctagtaatcaattacggggtcattagttcatagcccatatatggagttccgcgttacataacttacggtaaatggcccgcctggctgaccgcccaacgacccccgcccattgacgtcaataatgacgtatgttcccatagtaacgccaatagggactttccattgacgtcaatgggtggagtatttacggtaaactgcccacttggcagtacatcaagtgtatcatatgccaagtacgccccctattgacgtcaatgacggtaaatggcccgcctggcattatgcccagtacatgaccttatgggactttcctacttggcagtacatctacgtattagtcatcgctattaccatgctgatgcggttttggcagtacatcaatgggcgtggatagcggtttgactcacggggatttccaagtctccaccccattgacgtcaatgggagtttgttttggcaccaaaatcaacgggactttccaaaatgtcgtaacaactccgccccattgacgcaaatgggcggtaggcgtgtacggtgggaggtctatataagcagagctggtttagtgaaccgtcagatcgcctggagacgccatccacgctgttttgacctccatagaagacaccgggaccgatccagcctcccctcgaagcttacatgtggtaccgagctcggatcctgagaacttcagggtgagtctatgggacccttgatgttttctttccccttcttttctatggttaagttcatgtcataggaaggggagaagtaacagggtacacatattgaccaaatcagggtaattttgcatttgtaattttaaaaaatgctttcttcttttaatatacttttttgtttatcttatttctaatactttccctaatctctttctttcagggcaataatgatacaatgtatcatgcctctttgcaccattctaaagaataacagtgataatttctgggttaaggcaatagcaatatttctgcatataaatatttctgcatataaattgtaactgatgtaagaggtttcatattgctaatagcagctacaatccagctaccattctgcttttattttatggttgggataaggctggattattctgagtccaagctaggcccttttgctaatcatgttcatacctcttatcttcctcccacagctcctgggcaacgtgctggtctgtgtgctggcccatcactttggcaaaggcggccgctgccaagcttccgagctctcgaattc

SEQ ID NO: 277 - DNA, 1647 bp, Artificial Sequence
  pGP35.1
gccaccatggccacgcaggaggtgcgcctgaagtgcctgctctgtggcatcatcgtgctggtcctgagcctggaaggcctgggcatcctgcactacgagaagctgagcaagatcggactggtgaagggcatcacaagaaagtataagatcaagagcaatcctctgaccaaagacatcgtcatcaagatgattcctaacgtctccaatgtgtccaagtgcacaggaacagtgatggaaaactataagagcagactgaccggcatcctgtctccaatcaaaggcgccatcgagctgtacaacaacaacacccacgaccttgttggcgacgtgaagctggccggcgtggtgatggccggcatcgccatcggcattgccacagctgctcagatcaccgccggagtggccctgtacgaggccatgaagaacgccgacaacatcaacaagctgaaaagcagcatcgagagcaccaacgaggccgtggtgaaactgcaggagaccgccgagaagaccgtgtacgttctgaccgccctgcaggactacatcaacacaaacctggtccccaccatcgaccagatcagctgcaaacagacagagctggccctggacctggctcttagtaaatacctgtctgatctgctgttcgtgttcggccctaacctgcaagaccccgtgtctaatagcatgacaatccaggccatctcccaggcttttggcggaaattatgaaaccctgctgagaaccctgggctacgccacagaagatttcgacgatctcctggaaagcgacagcatcgccggccagatcgtctacgtggacctgagctcctactacattattgtgcgggtgtacttccccatcctgactgaaatccagcaggcttacgtgcaggagctgctgcctgtgtcttttaacaacgacaacagcgagtggatctctatcgtgcccaatttcgtgctgatccggaacacactgatcagcaacatcgaggtgaagtactgcctgatcacaaagaagtctgtgatctgcaaccaggactacgccacccctatgaccgcatctgtgcgggaatgcctgacaggcagcaccgataagtgtcctagagagctggtggtgagcagccacgtgcctagatttgccctgagcggcggcgtgctcttcgccaactgcatcagtgttacatgccagtgccaaacaaccggcagagccatcagccagagcggtgagcagaccctgctgatgatcgacaataccacctgtaccaccgtggtcctgggcaatatcatcattagcctggggaagtacctgggatctatcaactacaattctgagtctatcgccgttggaccacctgtgtacaccgacaaggtggatatcagcagccagatcagcagcatgaaccagagccttcaacaaagcaaggactacatcaaggaagcccagaagatcctggacaccgtgaaccccagcctgatcagcatgctgagcatgatcatcctgtacgtgctgtccatagccgctctgtgtatcggcctgatcaccttcatcagcttcgtgatcgtggaaaagaaaagaggcaactacagcagactggatgatagacaggtgcggcctgtgtccaacggcgacctgtattacatcggcacctga

SEQ ID NO: 278 - DNA, 1821 bp, Artificial Sequence
  pGP35.2
gccaccatgatggccgactctaagctggtgtccctgaacaacaatctgtccggcaagatcaaagatcagggcaaggtgattaagaactactacggcacaatggacatcaagaagatcaacgacggcctgctggacagcaagatcctgggagccttcaacacagtgatcgccctgctcggaagcatcatcatcattgtgatgaacatcatgatcatccagaactacacaagaacaaccgacaaccaggccctgatcaaagaaagcctgcagagcgttcagcagcagatcaaagccctgaccgacaagatcggcaccgaaatcggacctaaggtgtccctgatcgacacctcttctacaatcaccatccccgctaatatcggactgctgggctctaagatcagtcagagcacgagcagcatcaacgagaacgtgaacgacaagtgcaagttcaccctgcctccactgaaaattcatgagtgcaacatcagctgtcctaaccccctgcccttcagagaatacagacctatcagccagggagtttctgatctggtgggcctgccaaatcagatctgcctgcaaaagaccaccagcacaatcctgaagccccgcctgatctcttataccctgcccatcaacacccgggaaggcgtgtgcatcaccgaccctctgctggccgtggacaacggcttcttcgcctacagccacctggaaaagatcggctcttgcaccagaggcatcgcaaagcaaagaatcatcggcgtgggcgaagtgctggaccggggcgataaggtgcccagcatgtttatgaccaacgtgtggacccctcctaaccctagcacaatccaccactgttccagcacctaccacgaggacttctactacaccctgtgcgccgtgagccacgtgggcgaccccatcctgaatagcaccagctggaccgagagcctgagcctgatccggctggccgtgcggcctaagagcgactctggagattacaaccaaaagtacatcgctatcaccaaggtggaacggggcaaatacgataaggtgatgccttacggcccgagcggcatcaaacagggcgacaccctgtacttccctgctgtgggatttctgcctaggaccgagttccagtacaatgacagcaactgccccatcattcactgcaagtattccaaggccgagaactgtagactgagcatgggcgtgaactcaaagtctcactacatcctgagaagcggcctgctgaagtacaacctgagcctgggcggagatatcatcctgcagttcatagagatcgctgataatagactgacaatcggcagcccttctaaaatctacaactccctcggccagcctgtgttctaccaagccagctacagctgggacaccatgatcaagctgggcgatgtggacaccgtggaccctctcagagtgcagtggcggaacaacagcgtgatcagcagacccggccagagccagtgtcctagattcaacgtgtgtcctgaggtgtgctgggagggcacatataatgacgcctttctgattgacagactgaactgggtgtccgccggcgtgtacctgaactctaatcagaccgccgagaaccccgtgttcgccgtctttaaggacaacgagatcctgtaccaagtgccactggctgaagatgatacaaacgcccagaaaacaattacagattgcttcctgcttgagaatgtcatctggtgcatctcgctggtcgagatctacgacaccggcgacagcgtgatcagaccaaagctgttcgccgtgaagatccctgcccagtgcagcgagagctga

SEQ ID NO: 279 - DNA, 1656 bp, Artificial Sequence
  pGP37.1
atgggcagcagaccttcaaccaagaatcccgctccaatgatgctgacaatccgggtggccctggtcctgtcttgcatctgtcctgctaatagcatcgacggcaggcccctggccgctgcaggcatcgttgtgaccggcgataaggccgtgaacatctacacctcttcacagaccggcagcattatcgtcaagctgctgcctaacctgcccaaggacaaagaggcctgcgccaaggcccctctggatgcctacaaccggaccctgaccaccttactgacacctctgggagatagcatcagacgcatccaggagagcgtgacaaccagcggaggcggcagacagggccggctgatcggagccatcatcggcggcgttgccctgggcgtggctacagccgcacagatcaccgccgccgctgctctgatccaggccaaacagaacgccgccaacatcctgagactgaaggaatccatcgccgcgacgaacgaggccgtgcacgaggtgacagacggcctgtcccagctggctgttgccgtgggcaagatgcagcagttcgtgaacgaccagtttaacaagaccgctcaggagctggactgcattaagatcgcccagcaggtcggcgtggaactgaacctgtacctgacagagctgaccaccgtgttcggacctcagatcacatcccccgctctcaacaaactgacaattcaagccctgtataacctggccggcggcaatatggactacctgctgaccaagctgggcgtgggcaacaaccagctgtctagcctgatcggcagcggcctgatcacaggcaaccccatcctgtacgacagccagacacagctcctcggaatccaggtgaccgcccctagcgtgggaaacctgaacaacatgcgggccacatacctggaaaccctgagcgtgtccaccaccagaggcttcgccagcgcccttgtgcccaaggtggtgacccaagtgggctctgtgatcgaggaactggacacctcctactgtatcgagaccgacctggatctgtactgcaccagaatcgtgacttttcctatgagccctggcatctacagctgcctgagcggcaataccagcgcctgcatgtatagcaagaccgaaggcgccttgaccaccccttacatgaccatcaagggcagcgtgatcgccaactgcaagatgacaacatgccggtgcgtgaaccctccaggcatcatcagccagaactacggcgaagccgtgtctctgatcgacaagcagagctgtaacgtgctgagccttggtgggataaccctgagactgagcggcgagttcgacgtgacctaccagaaaaacatcagcatccaggacagccaggtgatcatcacaggaaatctggatatcagcaccgagctgggcaacgtgaacaattctattagcaacgccctgaacaaactggaagagtccaatagaaagctggacaaagtgaatgtgaagctgacaagcacctctgccctgatcacctacatcgtgctgaccatcatcagcctggtgttcggcatcctgtccctgatcctcgcctgttacctgatgtacaagcaaaaggcccaacagaaaaccctgctgtggctgggcaataacaccctggatcagatgagagccaccacaaag

SEQ ID NO: 280 - DNA, 1734 bp, Artificial Sequence
  pGP37.2
atggaccgggccgtgagtcaggtggccctggaaaacgacgagagagaggccaagaacacctggcggctgatcttccggatcgccatcctcttcctgaccgtggtgacactggctatttctgtggcctctctgctgtacagcatgggcgctagcacacctagcgacctggtgggcatcccaaccagaatcagcagagctgaagaaaaaatcacctccaccctcggaagcaaccaggacgtggtggacagaatctacaagcaggtggccctggaaagcccactggccctgctcaacaccgagacaaccatcatgaacgccatcaccagcctgagctatcagatcaacggcgctgccaacaacagcggctggggcgcccctatccacgaccccgattacatcggcggaattggcaaggaactgatcgtggatgacgccagcgatgtgacaagcttttaccctagcgcctttcaggagcacctgaacttcattcccgctccaaccaccggcagcggctgcaccagaatccctagcttcgacatgagcgccacccactactgctacacacacaacgtgatcctgtccggctgccgggaccacagccacagctaccaatacctggccctgggtgtgctgagaacctctgccacaggcagagtattcttcagcacactgagatctatcaacctggacgatacccagaacagaaagagctgcagcgtgagcgccacgcccctgggctgtgatatgctgtgctccaaggtgacagaaaccgaggaagaggactacaacagcgccgtgcccaccagaatggtgcacggccggctgggcttcgacggacagtaccacgagaaggatctggatgtgacaaccctgtttggcgactgggtcgccaattaccccggcgttggcggcggctctttcatcgacagccgcgtgtggttcagcgtgtacggcggcctgaaacctaacagcccttccgacaccgtgcaggagggcaagtacgtgatctacaaaagatacaacgacacctgccctgatgagcaggactaccagatcagaatggccaaaagcagctacaagcctggccggttcggcggaaagagaatccagcaggccatcctgtctatcaaggtgtctacctctctgggagaggaccctgtgctgacagtgccacctaataccgtgaccctgatgggcgctgaaggcagaatcctgaccgtgggcaccagccatttcctgtaccaaagaggctcttcatattttagccccgccctgctgtaccctatgacagtgtctaacaaaaccgccacactgcacagcccttatacattcaacgccttcacccggcctggcagcatcccatgtcaggcaagcgctagatgccccaatagctgtgtgaccggagtttacactgatccttaccccctgatcttctaccggaaccacaccctccggggagtctttggcaccatgctggacggagtgcaggccagactgaatcctgctagcgccgtgttcgacagcacctcccggtcccggataacaagagtctctagctccagcaccaaggccgcctacacaacaagcacatgcttcaaggtcgtgaagaccaacaagacatactgtctgagcatcgccgagatctctaataccctgttcggcgagttcagaatcgtgcctctgctggtcgagatcctgaaggacgacggcgtgcgggaagccagaagcggctga

SEQ ID NO: 281 - protein, 599 aa, Measles morbillivirus
MGSRIVINREHLMIDRPYVLLAVLFVMFLSLIGLLAIAGIRLHRAAIYTAEIHKSLSTNLDVTNSIEHQVKDVLTPLFKIIGDEVGLRTPQRFTDLVKFISDKIKFLNPDREYDFRDLTWCINPPERIKLDYDQYCADVAAEELMNALVNSTLLETRTTNQFLAVSKGNCSGPTTIRGQFSNMSLSLLDLYLSRGYNVSSIVTMTSQGMYGGTYLVEKPNLSSKGSELPQPSMHRVFEVGVIRNPGLGAPVFHMTNYFEQPVSNDFSNCMVALGELKLAALCHGEDSITIPYQGSGKGVSFQLVKLGVWKSPTDMQSWVPLSTDDPVIDRLYLSSHRGIIADNQAKWAVPTTRTDDKLRMETCFQQACKGKIQALCENPEWAPLKDNRIPSYGVLSVDLSLAVELKIKIASGFGPLITHGSGMDLYKSNHNNVYWLTIPPMKNLALGVINTLEWIPRFKVSPNLFTVPIKEAGEDCHAPTYLPAEVDGDVKLSSNLVILPGQDLQYVLATYDTSRVEHAVVYYVYSPSRSFSYFYPFRLPIKGVPIELQVECFTWDQKLWCRHFCVLADSESGGHITHSGMVGMGVSCTVTREDGTNRG

SEQ ID NO: 282 - protein, 526 aa, Measles morbillivirus
MGLKVNVSAIFMAVLLTLQTPTGQIHWGNLSKIGVVGIGSASYKVMTRSSHQSLVIKLMPNITLLNNCTRVEIAEYRRLLRTVLEPIRDALNAMTQNIRPVQSVASSRRHKRFAGVVLAGAALGVATAAQITAGIALHQSMLNSQAIDNLRASLETTNQAIEAIRQAGQEMILAVQGVQDYINNELIPSMNQLSCDLIGQKLGLKLLRYYTEILSLFGPSLRDPISAEISIQALSYALGGDINKVLEKLGYSGGDLLGILESRGIKARITHVDTESYFIVLSIAYPTLSEIKGVIVHRLEGVSYNIGSQEWYTTVPKYVATQGYLISNFDESSCTFMPEGTVCSQNALYPMSPLLQECLRGSTKSCARTLVSGSFGNRFILSQGNLIANCASILCKCYTTGTIINQDPDKILTYIAADHCPVVEVNGVTIQVGSRRYPDAVYLHRIDLGPPISLERLDVGTNLGNAIAKLEDAKELLESSDQILRSMKGLSSTSIVYILIAVCLGGLIGIPALICCCRGRCNKKGE

SEQ ID NO: 283 - protein, 569 aa, Nipah henipaviru
MKKINEGLLDSKILSAFNTVIALLGSIVIIVMNIMIIQNYTRSTDNQAVIKDALQGIQQQIKGLADKIGTEIGPKVSLIDTSSTITIPANIGLLGSKISQSTASINENVNEKCKFTLPPLKIHECNISCPNPLPFREYRPQTEGVSNLVGLPNNICLQKTSNQILKPKLISYTLPVVGQSGTCITDPLLAMDEGYFAYSHLERIGSCSRGVSKQRIIGVGEVLDRGDEVPSLFMTNVWTPPNPNTVYHCSAVYNNEFYYVLCAVSTVGDPILNSTYWSGSLMMTRLAVKPKSNGGGYNQHQLALRSIEKGRYDKVMPYGPSGIKQGDTLYFPAVGFLVRTEFKYNDSNCPITKCQYSKPENCRLSMGIRPNSHYILRSGLLKYNLSDGENPKVVFIEISDQRLSIGSPSKIYDSLGQPVFYQASFSWDTMIKFGDVLTVNPLVVNWRNNTVISRPGQSQCPRFNTCPEICWEGVYNDAFLIDRINWISAGVFLDSNQTAENPVFTVFKDNEILYRAQLASEDTNAQKTITNCFLLKNKIWCISLVEIYDTGDNVIRPKLFAVKIPEQCT

SEQ ID NO: 284 - protein, 524 aa, Nipah henipaviru
MVVILDKRCYCNLLILILMISECSVGILHYEKLSKIGLVKGVTRKYKIKSNPLTKDIVIKMIPNVSNMSQCTGSVMENYKTRLNGILTPIKGALEIYKNNTHDLVGDVRLAGVIMAGVAIGIATAAQITAGVALYEAMKNADNINKLKSSIESTNEAVVKLQETAEKTVYVLTALQDYINTNLVPTIDKISCKQTELSLDLALSKYLSDLLFVFGPNLQDPVSNSMTIQAISQAFGGNYETLLRTLGYATEDFDDLLESDSITGQIIYVDLSSYYIIVRVYFPILTEIQQAYIQELLPVSFNNDNSEWISIVPNFILVRNTLISNIEIGFCLITKRSVICNQDYATPMTNNMRECLTGSTEKCPRELVVSSHVPRFALSNGVLFANCISVTCQCQTTGRAISQSGEQTLLMIDNTTCPTAVLGNVIISLGKYLGSVNYNSEGIAIGPPVFTDKVDISSQISSMNQSLQQSKDYIKEAQRLLDTVNPSLISMLSMIILYVLSIASLCIGLITFISFIIVEKKRNT

SEQ ID NO: 285 - DNA, 20 bp, Artificial Sequence
  guide RNA
ctgcattctagttgtggttt

SEQ ID NO: 286 - protein, 522 aa, Queensland carbovirus
MISFNLILLILVPGQQKEGRSKLRSSRLVLLQFCQPLLPYILIYLVVPGMTLGCNISTTGLICNLTSTPTRIALNWTFPCDEANPDDQQPAECNITLMTHDPTPLHAKAEKCYVYVCTTSFGFWGVYSESREITRTLHRDECNFVEEIPEDPYQCDYWWCQYNVKTEKCLCITENVTVVGLPNGHLYCSFEDCSTLSSGTKLQHTPTLTKILILNNTSHENVTYLNQPATIINSTRVMIHSLHKEYTIYNGTINATDLSGVCSEKTQIKRRKRDAGQGYTVDSIGHLLYPGFEACRLLRTLLPAIALQPLLDHTPLIQAWFNNDSLAGKVVSDTALIWTCKKVSCDLQNLSTNSLYFPVSCNKHNFSLNPWTSVLYSDGPNVGPGRYLALKLSNGSHVIGVTGSGICPQVIKEPSMTTGIFSFTIPDLHEELIQSAHVLDPVFYALGMNKDFSTTLHSSSNHETNVSESLWHIGLPSFSFINPLGWIRDLTSWAAWLGGILYLATLIVFLVRTLTRKIKYGR

SEQ ID NO: 287 - protein, 523 aa, Southwest carbovirus
MISFNLTLLTLVLGPQRGDQSRPRSSHLARQLQSRLLLYLTFILICLTIPGTTSECNITTNGLHCNLTSTPTRISLNWTFPCDDFNQDNHQPARCNITLKTHDPTPLHAKAEKCYIYTCTTSFGFWGVYSESREVTRTLHRNGCEFLDEIPEDPYTCNYWWCKYNVKTERCLCLTENITVVALPNGHLYCSFEDCSMLSAQLKIQYTPTLTKVLILDNVTHTNATYANQPATIINGTRVMIHSLHKEYTIVNYTLNDTSIDGQCEAASSTRRRRDASQGYTIDSIGHLLYPGFEACRLLRTLLPAIALQPLLDHTLLLQAWFKNDSIAGRIVSDTALVWTCERVDCQLKNLSSTSLYFPVQCNDKNFSLNPWTNVLYSDGPDVGPGRYLALKIANGSHITGVTGSGICPQVIEEPSMTTGIFSFTIPDLHEDLIQSVHILDPVFYALGMRRDFSATLHSSTNHETNTSETLWHIGLPSFSFLNPLGWIRDLTSWAAWLGGILYLVTIVIFLIRTLTRRVKYGR

SEQ ID NO: 288 - protein, 503 aa, Mammalian 1 orthobornavirus
MQLSMSFLIGFGTLVLALSARTFDLQGLSCNTDSTPGLIDLEIRRLCHTPTENVISCEVRYLNHTTINLPAVHTSCLKYHCKTYWGFFGSYSADRIINRYTGTVKGCLNNSAPEDPFECNWFYCCSAITTEICRCSITNVTVAVQTFPPFMYCSFADCSTVSQQELESGKAMLSDGSTLTYTPYILQSEVVNKTLNGTILCNSSSKIVSFDEFRRSYSLANGSYQSSSINVTCVNYTSSCRPRLKRRRRDTQQIEYLVHKLRPTLKDAWEDCEILQSLLLGVFGTGIASASQFLRGWLNHPDIIGYIVNGVGVVWQCHRVNVTFMAWNESTYYPPVDYNGRKYFLNDEGRLQTNTPEARPGLKRVMWFGRYFLGTVGSGVKPRRIRYNKTSHDYHLEEFEASLNMTPQTSIASGHETDPINHAYGTQADLLPYTRSSNITSTDTGSGWVHIGLPSFAFLNPLGWLRDLLAWAAWLGGVLYLISLCVSLPASFARRRRLGRWQE

SEQ ID NO: 289 - protein, 503 aa, Mammalian 2 orthobornavirus
MQSTQHSMSFPIVCVILGSVLLVQTFELRGLRCNTDSTPALVDLEIRRLCHTPSENVISCEVSYYNHSQQSLEARHTSCYKYHCKTYWGFFGSYSADRLVSRYTGAFNVCNNGSFPDDPYECNWYYCCSALTTEICRCSINNVTVAVRTFPPFMYCSFADCSTVSQLELTTGFASLSDGSVLEFEPWNISKELINGTFNGTILCNSSSKIISFDEFRRSYSLVNGTYMSSSINITCSSYNGTCRAKPRKKRDLSQIEYLVHKLRPTLRDAWEDCEILQSLLLGVFGTGMASASQFLREWLNQTNIVGYVVNGVGVVWQCDWVNVSFLPWNESTYYPPVNFSNSRLYLNDESRLQTSTPEARPGLKRVLWFGRYFLGTVGSGVKPRRIRYNRTSHDFHLQDFDASLNLTPSINLATGHETDPINHAFGTQANLLPYTRSNNITSTDTGSGWVHIGLPSFAFLNPLGWLRDIFSWAAWIGGILYLITLCISLPASFARRRRLGRW

SEQ ID NO: 290 - protein, 511 aa, Passeriform 1 orthobornavirus
MRSRASTQSMLPSTFFLIGCGTLVLVRLHLISAPQALKCNTDSTPALIDLEIRRLCHNKTEDVVPCEVRYRNHTTTELSAVHISCYKYHCKTYWGFFGSYSADRLINRYLGSASSCINTSSEDPFKCTWHYCCSARVTEICRCSISNVTVAVKSFPPFMYCSFSDCSTVSESELRLGRANLSDGSYLLFDQYNISSDIINGTFNGTILCNSTSKVVSFDEFRRSYPLKNWTYTSETLNVTCNGTYFSNCSGKTRKKRDTPQIEYLVHKLRPTLRDAWEDCEILQSLLLGVFANGMASSSRFLREWLNHSDIVGYVVNGIGVVWQCNRVNITFLPWNESTYYPPVKAESKLYYLNEEGRLQTSTPEARPGLKRIFFHERFYLGTVGSGLRPKRVKYNRSSHDYHLNEFEWSLNVTPVVNIIVGHETNPINHAYGTQSDLLPYTRSTNLTSTDTGSGWVHIGLPSFAFINPLGWIRDILSWAAWLGGILYLITLCISLPALFMRRRRLGRWRE

SEQ ID NO: 291 - protein, 500 aa, Passeriform 2 orthobornavirus
MQHLMSSHIAFGILVWGLLDLTFALTALKCNTDSTPTLIDLDIRRLCHNRTDHVVSCEVSYRNHTVLDIRANHVSCFKYHCKTYWGFFGSYSSDRLINRYLGDASLCSNETKEDPFVCNWYYCCTAQVTEICRCTTNNVTIAVKTFPPFVYCSFADCSTVNERDLAQGRANLSDGSYLLFSNLTISSDWTNGTFNGTILCNSTSSVVSIDAFRRAYPLRNCTYTSETLNITCQNCSEPCRSRRRKRDLPEMQYLVHKLRPTLADAWEDCEILQSLILGIFGSGMTGSSQFLREWLNHSDIVGYIVRGIGVVWQCHKVNISFLPWNESTYYPPVNASGERLYLNDEGRLQTNTPEARPGLKRIFWHEKYYLGTVGSDIKPKRVKYNRTSHDYHLSEFEWALNITPSINIMAGHETNPINHAYGTQSDLLPYTRSSNITSTDTGSGWVHIGLPSFAFINPLGWIRDIMSWAAWIGGILYLITLCISLPALFVRRRRLGRWRE

SEQ ID NO: 292 - protein, 499 aa, Psittaciform 1 orthobornavirus
MLPLMCFPIVFGTLVLALLDLTSGLQALRCNTDSTPALIDLEIHRLCHNRTEHVVPCEVSYRNHTVIELSAQHISCYKYHCKTYWGFFGSYSADRLISRFTGDVQQCINETQEDPFVCNWYYCCSAQIHEICRCSSSNVTVAVKTIPPFMYCSFADCSTVSPQELSEGKASLSDGSFLRFQQTNITSSTVNQTLNGTILCNQSPIVSFDEFRRSYGLTNGTYTGDTISISCNITAAKCPKSRRKRDLSQIQYLVHTLRPTLRDAWEDCELLQSILLELFGSGTTSSSRFLRSWLNSTDIVGYVVNGVGVIWQCEPTNVTFLPWNESTYYPPVQVEGQRFYLNDEGRIQRNTPEAKPGLKRIFWHERYYLGTVGSNMKPKRVKYNKSSHDYHLGEFNWALNITPGINLGVGHETNPINHAFGTQSDLLPYTKSSNITSTDTGSGWVHIGLPSFAFISPLGWIRDILSWAAWLGGILYLVTICISLPALIVRRRRLGRWSE

SEQ ID NO: 293 - protein, 499 aa, Waterbird 1 orthobornavirus
MSSLIVFGTLVLDLSALTSAFQALKCNTDSTPTLIDLEIRHLCHNSTENVISCEVSYCNHTSTEVPATHISCFKYHCKTYWGFFGSYSADRLINRYTGQPRLCINTTGEDPFVCNWYYCCSAIVNEICRCSVANVTIVVRTFPPFAYCSFADCSTVSESELNRGRANLSDGSFLLFTPQNITFDAVNITLNGTVMCNQSSKVVSFDEFRRSYPLVNGTYCSSTLNITCSNISGTCRQRSKRTRRDLSQMEYLVHKLRPTLRDAWEDCEILQSLLLGVFGSGLTSASRFLREWLNHTDIVGYVVNGIGIVWQCQRVENVTFMPWNESTYYPPVKVDGRRLYLTEEGRLQTNTPEARPGLKRIFWHERLYLGTVGSGLRPRRVKYNRSSHDYHLDEFNWRLNLTPSINILTGHETNPINHAYGTQSNLLPYTRSNNITSTDTGSGWVHIGLPSFAFINPLGWIRDILSWAAWIGGILYLITLCISLPALFTRRRRLGRWKE

SEQ ID NO: 294 - protein, 499 aa, Elapid 1 orthobornavirus
MLPSMCILIGSGMLELVHLVQTSELQALNCDTRSSPALIDLEIRRLCHKTTENVVSCEVSYQNHTVEEVKATLVSCYSYRCTTYWGFFGSYSADKMTFRYTGNATTCNNQTVEEPYICNWYYCCSKAVNTICRCTNNNVTVVIKSAPPYMYCSFGDCSTVTKREIERGLAKLSDGSLLYFNSTIIPPDIVNTSINGSVLCNNKSKLVSFDKFRRSYPLRKWKYNSQSINITCSNDSNICPAKRRKRDLSQVSYALHKIRPILADAWEDCEIMQSLILGMTGSNLFSSSQFLRKWLNRTDIIGYVVGGLGVIWQCSRVNVSFLSWNESTYFPPVSYMDKIMYLNDEDRLQDSTPEAKPGLKRLLLHGSYFLGTVGSGLKPKLVSYDRSTHDYHLDEFDAIFNLTPEVDLISGHETNPINHAFGTQSGLLPYTRSTNLTSTDTGSGWVHIGLPSFTFLNPLGWVRDILSWAAWIGGILYLITLCISLPALINRKRRLGRWS

SEQ ID NO: 295 - protein, 415 aa, Lloviu cuevavirus
MVPTYPYSSLLDWRPPPNTLPWILNLVVFYTIAWLPGGVSGIPLGLLGNNSITQTVVDNVVCKEHLATTDQLQAIGLGLEGLGEHADLPTATKRWGFRSDVIPKIVGYTAGEWVENCYNLEITKKDGHPCLPSPPTGLLGYPRCRYVHRAKGAGPCPGGNAFHKHGSFFLYHGMASTVIYHGVTFTEGTIAFLIVPKDAPRLKAGLGTGFSHQAENQNPNNQFRTTTLDYDVMSPWMDNATFFFRAREDTSMLIQTRYPPANLELVQERLANLTGDQADPSKMEEIVAEVLTLELGDWSGWTTKKTAVQTIRLRNPSPASGSTKDKTGQKPMTDHQEFILQPHSAVGQPCLWNILRTPGRNPARRHRRETPPTMSITAAPGSGYKPYIQAIPLVKFRCHWEGLRHVCRRYPSWVQ

SEQ ID NO: 296 - protein, 320 aa, Lloviu cuevavirus
MPLGGSSACVSSIPLLGSVSNNSSIQELETSSKSATELTTPINHSQSLQLASVTNTPTPTTQSKSWTVDYNNTTPTMDPTTILTTPDTATIPPNNSSDHNATTTSKTRRRRQVNPVPPTITQQTSTSINTSHHPNMTTQLARHPSVQTRMQNPSCNPNLRYWTSREMSNAGGLAWIPWIGPGIEGGITDGIMEHQNTIVCQLRELANTTTKALQLFLRATTELRTYSILNRHAIDFLLQRWGGTCRILGPNCCIEPHDWSANITAEINHIREDILNHHEIQPSQDPSFWTGWQQWIPTGASALGIILAILALICLCRITR

SEQ ID NO: 297 - protein, 662 aa, Mengla dianlovirus
MALAKKYLMRIFIISHYFLSYNYGFFLPIVKLDIQPENEIIKSPCNGVVKKTEDIHLMSLTLTGQKTASDPMAASKRWAFKEGVLPKTVAFTEGEEAKDCFNISIVDLQGRSLLLEAPSGIKDYPRCKSIHHIQGQNPHAKGNVLHLWGAFFLYDRIASTTMFKDKVFAEGNVAALVINKTVHHQIFKINKIPQNETIGSCNHTYWRSDAGDGFNTTLAVTNLAYVLSANESTKIFKQMQDDLRKRIENMTSSNLTTLSPEAISNSSDANSSATIAYGTSGASISATTRSATSTLTITTDGQMSPPPTPAPPSPSLKPSTDDIKTPTVLSTTSSSTRSKRSVTVAKQSSANPTGKQRGRGRKGPSTGTLTEEQIERVRMLIQKNVGRVNYNNLPLIAGLTALKKKRQVLETFSGEIELEELIGDEKLDSRFRENLKMILETLRNESYSHFELDIPKTAALKSPEETDPRIHMEYLGSGEEPIQSNGQTDTDCDPSLRIWTPNEEKLAAGVSWIPYFGPGAEGLYTMGLMQNQNDVVCRLRRLANQTAKSLDLLLRVTTEERTYSIINRHAIDFLLARWGGTCRVLGPECCIGVEDLTKNITDQIQQMRRDEQDEYEGWGKGGNWFNSQFGNWLNLGILIFLFLGIIIALSCVCRLFMNLTVY

SEQ ID NO: 298 - protein, 672 aa, Bombali ebolavirus
MILQVPEKRHQRTVLFIWLVILFQRAVSVPLGVIHNSTLQVSDIDKLVCHDKLTSTNQLRSIGLNLEGNGIATDVPSATKRWGFRAGVPPKVVGYEAGEWAENCYNLEIKKPDGSECLPMAPEGIRGFPRCRYVHKVSGTGSCESGFAFHKEGAFFLYDRLASTIIYRGTTFAEGVVAFIILPKAEKNFLQPPLTQGPTNTTNDPSSMYHSTTLEYETTRFGTNRSAFWFKVDNLTFVQLESRFTPQFLVELNETIYIEGKRSNTTGRLIWQVNSRVDTDVGEWAFWENKKNLKKSFPREELSLAAVPRAADSEHDTHPPEHTPGPDSNPTINDNTELVTEDPAHLVQLQRQGRKEILPTPIPQAIEREPPAAQHDNPRNSPTPPSPIESDITDSTQAEDLTHADDPSTINSATEESLPEVGGITQVPRDPEDPRITLSTPPTSQPEQPSDNTMTPGQIHSESAAPMGERSIDGPGLLTNTLAGVARLITGAGRAKRESPEIRGAKCNPNLHYWTTHEESAAAGLAWIPYFGPAAEGIYTEGLMQNQNELICGLRQLANETTQALQLFLRSTTELRTFSILNRKAIDFLLQRWGGTCRILGPDCCIEPHDWTKNITDRIDQIIHDFVDKPLPDQSNNDNWWTGWRQWIPAGIGVVGVIAAFIALICICKIIC

SEQ ID NO: 299 - protein, 676 aa, Bundibugyo ebolavirus
MVTSGILQLPRERFRKTSFFVWVIILFHKVFPIPLGVVHNNTLQVSDIDKLVCRDKLSSTSQLKSVGLNLEGNGVATDVPTATKRWGFRAGVPPKVVNYEAGEWAENCYNLDIKKADGSECLPEAPEGVRGFPRCRYVHKVSGTGPCPEGYAFHKEGAFFLYDRLASTIIYRSTTFSEGVVAFLILPETKKDFFQSPPLHEPANMTTDPSSYYHTVTLNYVADNFGTNMTNFLFQVDHLTYVQLEPRFTPQFLVQLNETIYTNGRRSNTTGTLIWKVNPTVDTGVGEWAFWENKKNFTKTLSSEELSVIFVPRAQDPGSNQKTKVTPTSFANNQTSKNHEDLVPEDPASVVQVRDLQRENTVPTPPPDTVPTTLIPDTMEEQTTSHYEPPNISRNHQERNNTAHPETLANNPPDNTTPSTPPQDGERTSSHTTPSPRPVPTSTIHPTTRETHIPTTMTTSHDTDSNRPNPIDISESTEPGPLTNTTRGAANLLTGSRRTRREITLRTQAKCNPNLHYWTTQDEGAAIGLAWIPYFGPAAEGIYTEGIMHNQNGLICGLRQLANETTQALQLFLRATTELRTFSILNRKAIDFLLQRWGGTCHILGPDCCIEPHDWTKNITDKIDQIIHDFIDKPLPDQTDNDNWWTGWRQWVPAGIGITGVIIAVIALLCICKFLL

SEQ ID NO: 300 - protein, 677 aa, Reston ebolavirus; identical to SEQ ID NO: 185

SEQ ID NO: 301 - protein, 676 aa, Sudan ebolavirus
MGGLSLLQLPRDKFRKSSFFVWVIILFQKAFSMPLGVVTNSTLEVTEIDQLVCKDHLASTDQLKSVGLNLEGSGVSTDIPSATKRWGFRSGVPPKVVSYEAGEWAENCYNLEIKKPDGSECLPPPPDGVRGFPRCRYVHKAQGTGPCPGDYAFHKDGAFFLYDRLASTVIYRGVNFAEGVIAFLILAKPKETFLQSPPIREAVNYTENTSSYYATSYLEYEIENFGAQHSTTLFKIDNNTFVRLDRPHTPQFLFQLNDTIHLHQQLSNTTGRLIWTLDANINADIGEWAFWENKKNLSEQLRGEELSFEALSLNETEDDDAASSRITKGRISDRATRKYSDLVPKNSPGMVPLHIPEGETTLPSQNSTEGRRVGVNTQETITETAATIIGTNGNHMQISTIGIRPSSSQIPSSSPTTAPSPEAQTPTTHTSGPSVMATEEPTTPPGSSPGPTTEAPTLTTPENITTAVKTVLPQESTSNGLITSTVTGILGSLGLRKRSRRQTNTKATGKCNPNLHYWTAQEQHNAAGIAWIPYFGPGAEGIYTEGLMHNQNALVCGLRQLANETTQALQLFLRATTELRTYTILNRKAIDFLLRRWGGTCRILGPDCCIEPHDWTKNITDKINQIIHDFIDNPLPNQDNDDNWWTGWRQWIPAGIGITGIIIAIIALLCVCKLLC

SEQ ID NO: 302 - protein, 676 aa, Tai Forest ebolavirus; identical to SEQ ID NO: 186

SEQ ID NO: 303 - protein, 676 aa, Zaire ebolavirus; identical to SEQ ID NO: 25

SEQ ID NO: 304 - protein, 681 aa, Marburg marburgvirus
MKTTCFLISLILIQGTKNLPILEIASNNQPQNVDSVCSGTLQKTEDVHLMGFTLSGQKVADSPLEASKRWAFRTGVPPKNVEYTEGEEAKTCYNISVTDPSGKSLLLDPPTNIRDYPKCKTIHHIQGQNPHAQGIALHLWGAFFLYDRIASTTMYRGKVFTEGNIAAMIVNKTVHKMIFSRQGQGYRHMNLTSTNKYWTSSNGTQTNDTGCFGALQEYNSTKNQTCAPSKIPPPLPTARPEIKLTSTPTDATKLNTTDPSSDDEDLATSGSGSGEREPHTTSDAVTKQGLSSTMPPTPSPQPSTPQQGGNNTNHSQDAVTELDKNNTTAQPSMPPHNTTTISTNNTSKHNFSTLSAPLQNTTNDNTQSTITENEQTSAPSITTLPPTGNPTTAKSTSSKKGPATTAPNTTNEHFTSPPPTPSSTAQHLVYFRRKRSILWREGDMFPFLDGLINAPIDFDPVPNTKTIFDESSSSGASAEEDQHASPNISLTLSYFPNINENTAYSGENENDCDAELRIWSVQEDDLAAGLSWIPFFGPGIEGLYTAVLIKNQNNLVCRLRRLANQTAKSLELLLRVTTEERTFSLINRHAIDFLLTRWGGTCKVLGPDCCIGIEDLSKNISEQIDQIKKDEQKEGTGWGLGGKWWTSDWGVLTNLGILLLLSIAVLIALSCICRIFTKYIG

SEQ ID NO: 305 - protein, 426 aa, Xilang striavirus
MNLWITIAALLVLPSHLPSTVSADIIAEKSIVIDRMAKLIIPLGPPATSSKCINIKEAERQNGNLRDLLTEHHKPHRGTRSITLILTLLIMIVGAYIAKTALEGFSNNARQTADTLSSQGDLNALTGNALKQVNAQLKKLAARVFNLEENAAATSDRLSQLECSQKFLMGAHTNPHASYCKNVLLKHLVKTPSGISLPESSWACLPEEALLSPITPYVLSFDTAGTPVLIVGYGDVISAGPIVARVFDFTVGNDSSASMVVFKRPVIILQDVYMSPESCGCTIMAESQVVCRAHTSECSGGTPVAECVQRGDCMAYESLEGPAINWATVGFDPEKMTMTAREGPINGTSLDQLLQQRDREETRYQTNMDELRKSSIEAEGWLTALKRYLLYGAMALMALFLVQTAITCVKNLQAEDNRSRSTRGGY

SEQ ID NO: 306 - protein, 678 aa, San Jacinto virus
MYGVHLYLLNHMLLMAQRTNLRSSPLQMSSPMICPKDGGLTINRLAEPLDCGADTTASPVAVEVYKKNLKVWTTPATAVYKEEWSCTATCYFFGAQEHREIPAARVKLSEIEAREIDHNFCTGVSGKKQMQGNKHTDPHDCTCSWTGTWKHRANSCQKKIGEVQVTHGGLMFSGLGPVAHCKYDDGKCELPDKQWVFWQPNPRVQENYLLAYNGTGQLLRKGVILVPGLQEAFRLTSCNEKATVRSVVSCNTSTGFALSYRELNPIRKKRSTWSAEDDATWARFRAYHESEGDGMPHVPLELVTLNTTKPLGAVGPTGKPLDETVAKALEAVRGELLLKLSYLTEAVTKPVMQIGPLCQMIRNHEEQLRNLAIANPTLYVRALYETPYLIGTSAGDYIGVWPCKPVLDYDFVEQTGNCTKDPPIKYRLEQEEPWRMGYLDTATNIISDSSPRIKCKALPTTLTIRKQRLYLYKEGVMKEVPKAGITEFAQIKPRSSDSFLIDWGNNWLYNTSDFYLPNYEADVYDYISEQIDKSSSKYTGDTARADEGDRSTSVGLPKFNLPWPFVTLGLFGSLLKYAMYIAVGWLLLDRFRQGRRGSSSSNQTTKIEFGTLRETPSPPPPTEDELDELARLHKERKQARQTRETSVERGLKRLNNLFGKRKAEREDPEESIPMKVRI

SEQ ID NO: 307 - protein, 598 aa, Sierra Nevada virus
MICPRHGGMTIHRLPEFINCQETDRHWNATVKVYKKNLRLWDTNATSVFKEEWKCSSTCYFFGSEATNYEITHRVRIGEPEARDIKAGRCTTLKGTFGLTPDEHAEKKDCSCSWTGTDEASAHRCKRQEGTVQVTHGGAMFSGLGPVSHCNYTTGVCELPDNQWLFWQPVQEVQEEFILAHEGVGFVVNNRTLILPDLQETLFFENSCLEMHKNKTCLATTGFKVELTATPIESPPYQRRYRRSLRGDMVHASERDLHALEEEILGKMGYLESLWAPYIDEVDSLCQQMAKHERQLRMLAATNPTLYLRAVYSNPFLAGAVSGDFIGAWPCKAVMDYDFLEQASPNCTRDPPVEYRLEREGPWKPGYLDLATNIILETSPRINCKYLPTTITGRNGRLFLYKGGRMHEQDTSLIRTLPGIKKESHDRFLIMWNDTWLYNETDFATPDTENQIYQYIEEKIDQTSQEFKGDTGPRQDSKKGGFLPLTRLQPWFSLESFWRIRNACTLLWHCGSWLAYCFQGEKQESNKQPLTDDNQLPGHNQQESYIGDSQRPENSRRGKNKQKAPPTSTFDSWETGKYPEKVMALSSLRDRTCRNGSL

SEQ ID NO: 308 - protein, 567 aa, Soybean cyst nematode nyami-like virus
MSHKTASLMMMWLSFTFWTIWASGIATATLPNDYAALICAKKPTTILQLPPSTCPPTYTESRQVKGVMLDLNPFSHPLLATRVCKVERTCSIFDQSRPFGHIYPGPPIITNTPVPLSEYEAKVHLTDLTEHPTGWQQQGEEAVSNDPCQKIQLSETGIGENSGSVVSVKKIQTQVRQEQTRTGRVINTGLGSHCDYLEGECQDKHGCWLLWTPAPSAQNWRTGVADVEGVLYLQPDGRAYFHSANLSWSYHVRETQRDGTPIWMTDDGDNAFILIEKPGARGKRAIEHTQLALDLGNIANARLNWLCDDKMGAALWHLAAWQSAPTAVARSLLKRDDVHAEACGLGCLVIYDCVKITAIKVIETTECYLHPRITYRLPSETREIEGHVDTTNQLILSMSPEVACETGPLRYMRLDTGTLLIIYPGGKTEMRAIDASPKAAALNPVLMTLVSPLPNQLWDPSQVNPLATGISQLRTALSQWTGADHLSPREVEEAMENRARERALNLNPDAGWIGAVGTALEWTSWLICAATGSRWLSFIVTMSVDALKRRYLTQPRPEAPESAETGV

SEQ ID NO: 309 - protein, 527 aa, Formica fusca virus 1
MRPSCLLLALAAVCVTGRSPLLCQRKRGLRVFKKDEPLNCLSNAHVQTVEVQLKVPSFKEAHASGHWTGLYKATCETHYFFWGSYTREFWHVSVPLLSTQRNDIKQGGCPSLTHPVPLLHHPEPSCVYTWPKQTNTEIMYCITRPTTIRKLYGQPLTSDEEQLDERTVQNNGAFTVTGAVVHWEQNIIEPTQKEVKYTGVALLQENQLIIESLQEGFMLLPGPTNDGPYEVWKTIEGYELRILQKTRNKRQSYQEAMQGEITSKLQYESYIMDQYLQKFQQTCFKQQLTTRTLDTIYKENADEYARALLNETDITAATAGDYLLVWPCKRPEIWYIREQEDEQVCTQDIPIIYTSDAKNYTGYYKIRTGRIVNDTNRLPCESVQTTPFMKDERLYTWDGRCVTRISTEGVKGFAYPNQGAHMAPVWSNHWLYHESDFHREPPLYLTKRDIELQQLVQHTDTYTNTVGVPFMNMPSLPSLARCLELFSLTGGFLYLMGLILTRLTRQNRPPPTGTSPLELYRLMRQNT

SEQ ID NO: 310 - protein, 580 aa, Avian metaavulavirus 2
MDFPSRENLAAGDISGRKTWRLLFRILTLSIGVVCLAINIATIAKLDHLDNMASNTWTTTEADRVISSITTPLKVPVNQINDMFRIVALDLPLQMTSLQKEITSQVGFLAESINNVLSKNGSAGLVLVNDPEYAGGIAVSLYQGDASAGLNFQPISLIEHPSFVPGPTTAKGCIRIPTFHMGPSHWCYSHNIIASGCQDASHSSMYISLGVLKASQTGSPIFLTTASQLVDDNINRKSCSIVASKYGCDILCSIVIETENEDYRSDPATSMIIGRLFFNGSYTESKINTGSIFSLFSANYPAVGSGIVVGDEAAFPIYGGVKQNTWLFNQLKDFGYFTHNDVYKCNRTDIQQTILDAYRPPKISGRLWVQGILLCPVSLRPDPGCRLKVFNTSNVMMGAEARLIQVGSTVYLYQRSSSWWVVGLTYKLDVSEITSQTGNTLNHVDPIAHTKFPRPSFRRDACARPNICPAVCVSGVYQDIWPISTATNNSNIVWVGQYLEAFYSRKDPRIGIATQYEWKVTNQLFNSNTEGGYSTTTCFRNTKRDKAYCVVISEYADGVVGSYRIVPQLIEIRTTTGKSE

SEQ ID NO: 311 - protein, 536 aa, Avian metaavulavirus 2
MNQALVILLVSFQLGVALDNSVLAPIGVASAQEWQLAAYTTTLTGTIAVRFIPVLPGNLSTCAQETLQEYNRTVTNILGPLRENLDALLSDFDKPASRFVGAIIGSVALGVATAAQITAAVALNQAQENARNIWRLKESIKKTNEAVLELKEGLATTAIALDKVQKFINDDIIPQIKDIDCQVVANKLGVYLSLYLTELTTVFGSQITNPALSTLSYQALYSLCGGDMGKLTELIGVNAKDVGSLYEANLITGQIVGYDPELQIILIQVSYPSVSEVTGVRATELVTVSVTTPKGEGQAIVPRYVAQSRVLTEELDVSTCRFSKTTLYCRSILTRPLPTLIASCLSGKYDDCQYTTEIGALSSRFITVNGGVLANCRAIVCKCVSPPHIIPQNDIGSVTVIDSSICKEVVLESVQLRLEGKLSSQYFSNVTIDLSQITTSGSLDISSEIGSINNTVNRVDELIKESNEWLNAVNPRLVNNTSIVVLCVLAALIIVWLIALTVCFCYSARYSAKSKQMRGAMTGIDNPYVIQSATKM

SEQ ID NO: 312 - protein, 574 aa, Avian metaavulavirus 5
MDKSYYTEPEDQRGNSRTWRLLFRLIVLTLLCLIACTSVSQLFYPWLPQVLSTLISLNSSIITSSNGLKKEILNQNIKEDLIYREVAINIPLTLDRVTVEVGTAVNQITDALRQLQSVNGSAAFALSNSPDYSGGIEHLVFQRNTLINRSVSVSDLIEHPSFIPTPTTQHGCTRIPTFHLGTRHWCYSHNIIGQGCADSGASMMYISMGALGVSSLGTPTFTTSATSILSDSLNRKSCSIVATTEGCDVLCSIVTQTEDQDYADHTPTPMIHGRLWFNGTYTERSLSQSLFLGTWAAQYPAVGSGIMTPGRVIFPFYGGVIPNSPLFLDLERFALFTHNGDLECRNLTQYQKEAIYSAYKPPKIRGSLWAQGFIVCSVGDMGNCSLKVINTSTVMMGAEGRLQLVGDSVMYYQRSSSWWPVGILYRLSLVDIIARDIQVVINSEPLPLSKFPRPTWTPGVCQKPNVCPAVCVTGVYQDLWAISAGETLSEMTFFGGYLEASTQRKDPWIGVANQYSWFMRRRLFKTSTEAAYSSSTCFRNTRLDRNFCLLIFELTDNLLGDWRIVPLLFELTIV

SEQ ID NO: 313 - protein, 544 aa, Avian metaavulavirus 5
MLQLPLTILLSILSAHQSLCLDNSKLIHAGIMSTTEREVNVYAQSITGSIVVRLIPNIPSNHKSCATSQIKLYNDTLTRLLTPIKANLEGLISAVSQDQSQNSGKRKKRFVGAVIGAAALGLATAAQVTATVALNQAQENARNILRLKNSIQKTNEAVMELKDAVGQTAVAIDKTQAFINNQILPAISNLSCEVLGNKIGVQLSLYLTELTTVFGNQLTNPALTTLSLQALYNLCGDDFNYLINLLNAKNRNLASLYEANLIQGRITQYDSMNQLLIIQVQIPSISTVSGMRVTELFTLSVDTPIGEGKALVPKYVLSSGRIMEEVDLSSCAITSTSVFCSSIISRPLPLETINCLNGNVTQCQFTANTGTLESRYAVIGGLVIANCKAIVCRCLNPPGVIAQNLGLPITIISSNTCQRINLEQITLSLGNSILSTYSANLSQVEMNLAPSNPLDISVELNRVNTSLSKVESLIKESNSILDSVNPQILNVKTVIILAVIIGLIVVWCFILTCLIVRGFMLLVKQQKFKGLSVQNNPYVSNNSH

SEQ ID NO: 314 - protein, 613 aa, Avian metaavulavirus 6
MASSGDMRQSQATLYEGDPNSKRTWRTVYRVVTILLDITVLCVGIVAIVRMSTITTKDIDNSISSSITSLSADYQPIWSDTHQKVNSIFKEVGITIPVTLDKMQVEMGTAVNIITDAVRQLQGVNGSAGFSITNSPEYSGGIDTLIYPLNSLNGKALAVSDLLEHPSFIPAPTTSHGCARIPTFHLGYRHWCYSHNTIESGCHDAGESIMYVSMGAVGVGHRGRPVFTTSAATILDDGRNRKSCSIIANPNGCDVLCSLVKQTENEDYADPTPTPMIHGRLHFNGTYTESELDPGLFNNHWVAQYPAVGSGVVSHRKLFFPLYGGISPKSKLFNELKSFAYFTHNAELKCENLTERQKEDLYNAYRPRKIAGSLWAQGVVTCNLTNLADCKVAIANTSTMMMAAEGRLQLVQDKIVFYQRSSSWWPVLIYYDIPISDLISADHLGIVNWTPYPQSKFPRPTWTKGVCEKPAICPAVCVTGVYQDVWVVSIGSQSNETVVVGGYLDAAAARQDPWIAAANQYNWLVRRRLFTSQTEAAYSSTTCFRNTKQDRVFCLTIMEVTDNLLGDWRIAPLLYEVTVADKQQGNRNYVPMGRVGTDKFQYYTPGDRYTPQH

SEQ ID NO: 315 - protein, 545 aa, Avian metaavulavirus 6
MPSLSVRLILLLLPHIILTLDNSRLLQQGIMSATEREIKVYTNSITGSLAVRLIPNLPQAVQACSVQQIKSYNDTLNRIFTPIRVNLEKLLSGQELQDSSPHSIREPRLVGAIIGTAALGLATAAQVTAALALNQAQDNARAILNLKDSIRKTNEAVLELKEATGQIAVALDKTQRFINDNILPTINNLTCEVAGAKIGVELSLYLTELSTVFGSQITNPALSTLSLQALMSLCGNDFNYLLNLMGAKHSDLGALYEANLINGRIIQYDQANQIMVIQVSVPSISSVSGLRLTELFTLSIETPAGEGKAVVPQFVVESGQLIEEIDTQACTMTDTTAYCTIVRTKPLPDLVVGCLKGEESKCQYTTGIGMLESRFGVFDGLIIANCKATICRCLKPEMIIPQNRGSPITVISQEICSRVLIDGVTLQVEAQVSGSYSRNITVGSSQIAPSGPLDISSELGKVNQSLSNVEDLIDQSNQILNRVNPELVNDTAIIVTIVLLVLLVLWCLALTISVLYVSKHAVRMVKTLPNPYVMQAKSPSGTTQF

SEQ ID NO: 316 - protein, 569 aa, Avian metaavulavirus 7
MESIGKGTWRTVYRVLTILLDVVIIILSVIALISLGLKPGERIINEVNGSIHNQLVPLSGITSDIQAKVSSIYRSNLLSIPLQLDQINQAISSSARQIADTINSFLALNGSGTFIYTNSPEFANGFNRAMFPTLNQSLNMLTPGNLIEFTNFIPTPTTKSGCIRIPSFSMSSSHWCYTHNIIASGCQDHSTSSEYISMGVVEVTDQAYPNFRTTLSITLADNLNRKSCSIAATGFGCDILCSVVTETENDDYQSPEPTQMIYGRLFFNGTYSEMSLNVNQMFADWVANYPAVGSGVELADFVIFPLYGGVKITSTLGASLSQYYYIPKVPTVNCSETDAQQIEKAKASYSPPKVAPNIWAQAVVRCNKSVNLANSCEILTFNTSTMMMGAEGRLLMIGKNVYFYQRSSSYWPVGIIYKLDLQELTTFSSNQLLSTIPIPFEKFPRPASTAGVCSKPNVCPAVCQTGVYQDLWVLYDLGKLENTTAVGLYLNSAVGRMNPFIGIANTLSWYNTTRLFAQGTPASYSTTTCFKNTKIDTAYCLSILELSDSLLGSWRITPLLYNITLSIMS

SEQ ID NO: 317 - protein, 539 aa, Avian metaavulavirus 7
MRVRPLIIILVLLVLLWLNILPVIGLDNSKIAQAGIISAQEYAVNVYSQSNEAYIALRTVPYIPPHNLSCFQDLINTYNTTIQNIFSPIQDQITSITSASTLPSSRFAGLVVGAIALGVATSAQITAAVALTKAQQNAQEIIRLRDSIQNTINAVNDITVGLSSIGVALSKVQNYLNDVINPALQNLSCQVSALNLGIQLNLYLTEITTIFGPQITNPSLTPLSIQALYTLAGDNLMQFLTRYGYGETSVSSILESGLISAQIVSFDKQTGIAILYVTLPSIATLSGSRVTKLMSVSVQTGVGEGSAIVPSYVIQQGTVIEEFIPDSCIFTRSDVYCTQLYSKLLPDSILQCLQGSMADCQFTRSLGSFANRFMTVAGGVIANCQTVLCRCYNPVMIIPQNNGIAVTLIDGSLCKELELEGIRLTMADPVFASYSRDLIINGNQFAPSDALDISSELGQLNNSISSATDNLQKAQESLNKSIIPAATSSWLIILLFVLVSISLVIGCISIYFIYKHSTTNRSRNLSSDIISNPYIQKAN

SEQ ID NO: 318 - protein, 577 aa, Avian metaavulavirus 8
MSNIASSLENIVEQDSRKTTWRAIFRWSVLLITTGCLALSIVSIVQIGNLKIPSVGDLADEVVTPLKTTLSDTLRNPINQINDIFRIVALDIPLQVTSIQKDLASQFSMLIDSLNAIKLGNGTNLIIPTSDKEYAGGIGNPVFTVDAGGSIGFKQFSLIEHPSFIAGPTTTRGCTRIPTFHMSESHWCYSHNIIAAGCQDASASSMYISMGVLHVSSSGTPIFLTTASELIDDGVNRKSCSIVATQFGCDILCSIVIEKEGDDYWSDTPTPMRHGRFSFNGSFVETELPVSSMFSSFSANYPAVGSGEIVKDRILFPIYGGIKQTSPEFTELVKYGLFVSTPTTVCQSSWTYDQVKAAYRPDYISGRFWAQVILSCALDAVDLSSCIVKIMNSSTVMMAAEGRIIKIGIDYFYYQRSSSWWPLAFVTKLDPQELADTNSIWLTNSIPIPQSKFPRPSYSENYCTKPAVCPATCVTGVYSDIWPLTSSSSLPSIIWIGQYLDAPVGRTYPRFGIANQSHWYLQEDILPTSTASAYSTTTCFKNTARNRVFCVTIAEFADGLFGEYRITPQLYELVRNN

SEQ ID NO: 319 - protein, 543 aa, Avian metaavulavirus 8
MGKISIYLINSVLLLLVYPVNSIDNTLVAPIGVASANEWQLAAYTTSLSGTIAVRFLPVLPDNMTTCLRETITTYNNTVNNILGPLKSNLDALLSSETYPQTRLIGAVIGSIALGVATSAQITAAVALKQAQDNARNILALKEALSKTNEAVKELSSGLQQTAIALGKIQSFVNEEILPSINQLSCEVTANKLGVYLSLYLTELTTIFGAQLTNPALTSLSYQALYNLCGGNMAMLTQKIGIKQQDVNSLYEAGLITGQVIGYDSQYQLLVIQVNYPSISEVTGVRATELVTVSVTTDKGEGKAIVPQFVAESRVTIEELDVASCKFSSTTLYCRQVNTRALPPLVASCLRGNYDDCQYTTEIGALSSRYITLDGGVLVNCKSIVCRCLNPSKIISQNTNAAVTYVDATICKTIQLDDIQLQLEGSLSSVYARNISIEISQVTTSGSLDISSEIGNINNTVNRVEDLIHQSEEWLAKVNPHIVNNTTLIVLCVLSALAVIWLAVLTAIIIYLRTKLKTISALAVTNTIQSNPYVNQTKRESKF

SEQ ID NO: 320 - protein, 564 aa, Avian metaavulavirus 10
MEKIVLLLAIVSLVKSDQICIGYHANNSTEQVDTIMEKNVTVTHAQDILEKTHNGKLCDLDGVKPLILRDCSVAGWLLGNPMCDEFINVPEWSYIVEKANPSNDLCYPGNFNDYEELKHLLSRINHFEKIQIIPKSSWSDHEASSGVSSACPYQGRSSFFRNVVWLIKKNSAYPTIKRSYNNTNQEDLLVLWGIHHPNDAAEQTRLYQNPTTYISVGTSTLNQRLVPKIATRSKINGQSGRMEFFWTILKPNDAISFESNGNFIAPEYAYKIVKKGDSAIMKSELEYGNCNTKCQTPMGAINSSMPFHNIHPLTIGECPKYVKSSRLVLATGLRNSPQRETRGLFGAIAGFIEGGWQGMVDGWYGYHHSNEQGSGYAADKESTQKAIDGVTNKVNSIIDKMNTQFEAVGREFNNLERRIENLNKKMEDGFLDVWTYNAELLVLMENERTLDFHDSNVKNLYDKVRLQLRDNAKELGNGCFEFYHRCDNECIESVRNGTYDYPQYSEEARLKREEISGVKLESIGTYQILSIYSTVASSLALAIMVAGLSLWMCSNGSLQCRICI

SEQ ID NO: 321 - protein, 536 aa, Avian metaavulavirus 10
MTRTRLLFLLTCYIPGAVSLDNSILAPAGIISASERQIAIYTQTLQGTIALRFIPVLPQNLSSCAKDTLESYNSTVSNLLLPIAENLNALLKDADKPSQRIIGAIIGSVALGVATTAQVTAALAMTQAQQNARNIWKLKESIKNTNQAVLELKDGLQQSAIALDKVQSFINSEILPQINQLGCEVAANKLGIFLSLYLTEITTVFKNQITNPALSTLSYQALYNLCGGNMAALTKQIGIKDTEINSLYEAELITGQVIGYDSADQILLIQVSYPSVSRVQGVRAVELLTVSVATPKGEGKAIAPSFIAQSNIIAEELDTQPCKFSKTTLYCRQVNTRTLPVRVANCLKGKYNDCQYTTEIGALASRYVTITNGVVANCRSIICRCLDPEGIVAQNSDAAITVIDRSTCKLIQLGDITLRLEGKLSSSYSKNITIDISQVTTSGSLDISSELGSINNTITKVEDLISKSNDWLSKVNPTLISNDTIIALCVIAGIVVIWLVIITILSYYILIKLKNVALLSTMPKKDLNPYVNNTKF

SEQ ID NO: 322 - protein, 583 aa, Avian metaavulavirus 11
MDRSRSLDYLADSPEIKNTWRQFFRVVLIILQITMLCISISALAITIQVRDQHLPSLIKENPKTTSSLISSELNPLLSYLPGINREVQLNIPIQLDKIQQSATSEINRLTAAINQMAFGTLSPGLLLKNSKDYVGGINKPLIPSDKLNWTNATISGFIEHPSFIPGPTTKKGCTRIPSFHLAESHWCYTHNTIASGCEDHGVSSMYISGGILYKGSNKEPSLLTTVSILLADELNRKSCSIIASSYGCDVLCSLVTESESQDYKSVNPTPMVHGRLFFNGSYSEQELDPRIFGDLWTANYPGVGSGILLKDRLVFPIYGGLDETKLNLTSYLNHPLYTKNEWVSCNKSYDEVVQTLRAAYRPSWFAGRVVTQGVMVCHYDRELLGRCLIARFNTSTVMMGAESRLVMQGDSLLLYQRSSSWWPVGIVYLVPESIISINETNSVFDLSPIPLSKFPRPTNKKGYCERPAVCPAVCVTGVYQDLWPLSPLAIENRTATNPTFAGAFLNAFTTRTAPYFGVAGPNKWARSVQLFTDQTPASYSTTTCFKDTITTQTYCLIIIELQENLLGTWKIVPLLVKVSLVYS

SEQ ID NO: 323 - protein, 562 aa, Avian metaavulavirus 11
MGTCLNNRLSTIPSIKTVQCILIILSYIIPYSATDNPIADRSLLRAGIVPIYSKSLSVYTNSISGYLTVRMLPPLPKNLTECSQEVVSNYNKTITRMFQPISDNLMRIQEGTDSGTKRFVGAVIGSVALGVATSAQITAALAMVQAQDNAKAIWKLKEAISSTNQAVLELKEGVNTLGVAVDKIQGYINNEILPSLSELECRVNANKLASQLNLYLIELTTIFGDQITNPALTPLSLQALYTLAGDTMGSFLQYIGAQDNEIESLYDSGLINGQIVSYDASIQTIIIKVSIPSISSLSRFSIMRLATVSSSVGGFEKTPLVPEYLLISDNHIEEFSIVDCKESSDIFYCPQILSMPISTATVECLKGRIDQCIYTSQLTILSHRIVTYNGVVVANCFAELCRCTNPSYIIRQDRDVAVTVIDKDLCKRVQIGDIELIVQASIANEYKVNFTVSEDQLAPSTPIDISNELNSLNQTLDKVGQLINTSNQILASLNPKLVNNTSIIVLIVMGVVLILWLLALTIYSIYAARNLNSIGRLAKSAYASYVADKNVYKNESTSSSSI

SEQ ID NO: 324 - protein, 580 aa, Avian metaavulavirus 14
MEGSRTVIYQGDPNEKNTWRLVFRTLTLILNLAILSVTIASIIITSKITLSEVTTLKTEGVEEVITPLMATLSDSVQQEKMIYKEVAISIPLVLDKIQTDVGTSVAQITDALRQIQGVNGTQAFALSNAPEYSGGIEVPLFQIDSFVNKSMSISGLLEHASFIPSPTTLHGCTRIPSFHLGPRHWCYTHNIIGSRCRDEGFSSMYISIGAITVNRDGNPLFITTASTILADDNNRKSCSIIASSYGCDLLCSIVTESENDDYANPNPTKMVHGRFLYNGSYVEQALPNSLFQDKWVAQYPGVGSGITTHGKVLFPIYGGIKKNTQLFYELSKYGFFAHNKELECKNMTEEQIRDIKAAYLPSKTSGNLFAQGIIYCNISKLGDCNVAVLNTSTTMMGAEGRLQMMGEYVYYYQRSSSWWPVGIVYKKSLAELMNGINMEVLSFEPIPLSKFPRPTWTAGLCQKPSICPDVCVTGVYTDLFSVTIGSTTDKDTYFGVYLDSATERKDPWVAAADQYEWRNRVRLFESTTEAAYTTSTCFKNTVNNRVFCVSIVELRENLLGDWKIVPLLFQIGVSQGPPPK

SEQ ID NO: 325 - protein, 541 aa, Avian metaavulavirus 14
MEKGTVLFLAALTLYNVKALDNTKLLGAGIASGKEHELKIYQSSVNGYIAVKLIPFLPSTKRECYNEQLKNYNATINRLMGPINDNIKLVLSGVKTRTREGKLIGAIIGTAALGLATAAQVTAAIALEQAQDNARAILTLKESIRNTNNAVSELKTGLSEVSIALSKTQDYINTQIMPALSNLSCEIVGLKIGIQLSQYLTEVTAVFGNQITNPALQPLSMQALYQLCGGDFSLLLDKIGADRNELESLYEANLVTGRIVQYDTADQLVIIQVSIPSVSTLSGYRVTELQSISVDMDHGEGKAVIPRYIVTSGRVIEEMDISPCVLTATAVYCNRLLTTSLPESVLKCLDGDHSSCTYTSNSGVLETRYIAFDGMLIANCRSIVCKCLDPPYIIPQNKGKPLTIISKEVCKKVTLDGITLLIDAEFTGEYGLNITIGPDQFAPSGALDISTELGKLNNSINKAEDYIDKSNELLNRVNVDIVNDTAVIVLCVMSALVVVWCIGLTVGLIYVSKNTLRAVAIKGTSIENPYVSSGKHAKNSS

SEQ ID NO: 326 - protein, 579 aa, Avian metaavulavirus 15
MNSSYSQDNLYTNQTAAQPRGTWRVLYRAVSLIFQILIFSLVLTNVIQYSNLHSPSVSEISAATTTETIDGLKPHLETPLNQINDIFRLTALDLPIQMNTMTREITSQLNILTSGINELVTSNNSGRLLQTTDPAYTGGIGVFVLNNYLDYPPNLQNMSLLEQPNFVPGSTTTGGCTRIPTFHLSSTHWCYSHNIIEKGCHDAGHSSMYISIGVVQVSSRGVPVFLTTQSVIVDDETNRKSCSIVSTEYGCDILCSIVTERESDDYKSDPPTRMLHGRLLFNGSYVEAAVKFTNDINKFSANYPGVGSGILLGNKILFPLYGGIKQSTDLFNYLHNRTAQVSNNKTVCSTGYDKKKLEAAYRPPLIGGRFWAIGIVICKFSINSLGDCRYKIYDSSVVMMGSENRLMKVGNQVFLYQRSSSWWPIGLTYILNSTDLLNTDSDIVSSIIPIYHTKFPRPTYDRNACTRPNVCPATCIEGVYADIWPLNNPAEPSKIIWVSHYLNSEVGREFPAIGVANQYEWVKEFRPLPPTTGAAYATTSCFKNTISNRIFCVSVAEFKDNLFGQFRIVPLLYEIKVIN

SEQ ID NO: 327 - protein, 542 aa, Avian metaavulavirus 15
MYVPGVILALLMINPCLTLDNSKLAPVGIISAAEHELAIYTNTLSGSIAVRFLPNLPANLTHCQKTILDNYNVTVTRILKPIADNLNILKHGLEVPKERLVGAIIGTVALGVATSAQITAAVAVAQAQQNAKDIWKLKNAILSTNEAVLELKTGLQQTAIALDKIQDYINNEIIPTVNNLTCEVMANRLGVYLSLYLTELTTVFGNQITNPALSTISYQGLTNLCGNNIGALTKLIGLKDDNVESIYEAGLITGQVVDYDPASQILIIQVSYPSISRLSDIRATELITVGVTTPFGEGRAIVPKYVAQSTVLIEELDISSCKFSSTTLYCTQINTRPLPPRVSSCLKGDYENCQFTTEVGVLASRYASIGKGVVVNCRSIICKCLEPPRIIPQNSLASITVIDSKICKKLQLPDVILRLDGNLESQYFTNISINGGQVTPSGPLDISSEIGNINQTVNRVEDLIHESESWLSRVNPKLISNTAIIVLCVLSSLCVLWLILITAFMAKLLSNVKKIERKVAVSSLIGNPYVYTNPGYSGSKSA

SEQ ID NO: 328 - protein, 537 aa, Avian metaavulavirus 20
MMDSLRLTILLVAWFSLGECLDNANTGPIGVLKSKEWQLAAYTQSLYGTIAVRFIPILPSNLTSCMLSVIQDYNQTVSSLLGPIGNNLDSIISSSGEQQARLIGAIVGTVALGVATSAQITAALAVNQAQDNARQIWKLKEAILKTNDAVLELKEGLSQTAVALDKVQSFINNEILPQISSISCEVAANKLGVFLSLYLTELTTVFGNQITNPALTPLSYQALYNLCGGNLAALTRQMGIKDDTLTSLYEAGLIVGQIIGYDASSQILLIQVSYPSVSEITGVRATELVTVSVATIKGEGRAIVPQFVAEGHVTIEELDTSPCRFSKSTLFCRSILTRPLPIRVANCLSGKYDDCQYTTEIGLLSSRYVTVDGGVMANCKSTVCKCLNPEKIILQKTASAITAIDKNTCKLLQINDVKLRLEGTLHSQYFRNISIASNQITSSGSLDISSEIGAINNTVNKVEDLINQSNGWLDSVNPKLMSNTTIIILCVLSGLAIVWLLILTIIMCYSAYKLKSLSIIAAMNSATKNPYVSNTKF

SEQ ID NO: 329 - protein, 574 aa, Avian metaavulavirus 20
MSTADILSHIENYGQKNTWRSAFRITSLILLLLITGMTIAGLVIASNQSCATSEELADPITEKLITSIRDLLTVSNNQINDIFKIVALDIPLQVSSIQQDISSQFNKLMEGITSLIGYNNSAGVISTIDPSYSGGIGVPLFTTSGNSTLQIHPVSLIEHPSFIPNPTTNRGCTRIPTFHLSRTHWCYSHNVIAKGCADFGKSGMYISLGVIKTAELGTPVFLTTASQYVDDGVNRKSCSIAATRFGCDILCSIVTEKENDDYASDPPTEMVHGRLFFNGTFSDSNLDVKNLFRDFSANYPSVGSGEVIGDIVMFPFYGGVRQRTSLFDQLSQFGLFVHNNRYTCEQNWTMTTVKQSYLPPKISGRFWAQGIVKCRLVLQTLANCSISVFNSSKVMMGAEARLMLVGTTLYMYQRSSSWWPLGLTYILGPMHSYLVNEGLISQVTLIAHSKFPRPSNKAGYCARPSVCPAVCATGVYTDLWPITESSNASNIVWVGQYLDAITERKYPRIGVATQYDWIHQSNLFSSNTVSSYSTTTCFKNTRLNRSFCVIIAEFTDGLFGEYRIVPQLIELRVK

SEQ ID NO: 330 - protein, 577 aa, Avian orthoavulavirus 1
MDRAVSQVALENDEREAKNTWRLIFRIAILFLTVVTLAISVASLLYSMGASTPSDLVGIPTRISRAEEKITSTLGSNQDVVDRIYKQVALESPLALLNTETTIMNAITSLSYQINGAANNSGWGAPIHDPDYIGGIGKELIVDDASDVTSFYPSAFQEHLNFIPAPTTGSGCTRIPSFDMSATHYCYTHNVILSGCRDHSHSYQYLALGVLRTSATGRVFFSTLRSINLDDTQNRKSCSVSATPLGCDMLCSKATETEEEDYNSAVPTRMVHGRLGFDGQYHEKDLDVTTLFGDWVANYPGVGGGSFIDSRVWFSVYGGLKPNSPSDTVQEGKYVIYKRYNDTCPDEQDYQIRMAKSSYKPGRFGGKRIQQAILSIKVSTSLGEDPVLTVPPNTVTLMGAEGRILTVGTSHFLYQRGSSYFSPALLYPMTVSNKTATLHSPYTFNAFTRPGSIPCQASARCPNSCVTGVYTDPYPLIFYRNHTLRGVFGTMLDGEQARLNPASAVFDSTSRSRITRVSSSSIKAAYTTSTCFKVVKTNKTYCLSIAEISNTLFGEFRIVPLLVEILKDDGVREARSG

SEQ ID NO: 331 - protein, 553 aa, Avian orthoavulavirus 1
MGSRSSTRIPVPLMLTVRIMLALSCVCPTSSLDGRPLAAAGIVVTGDKAVNIYTSSQTGSIIIKLLPNMPKDKEACAKAPLEAYNRTLTTLLTPLGDSIRRIQESVTTSGGGKQGRLIGAIIGGVALGVATAAQITAASALIQANQNAANILRLKESIAATNEAVHEVTDGLSQLAVAVGKMQQFVNDQFNKTAQELDCIKITQQVGVELNLYLTELTTVFGPQITSPALTQLTIQALYNLAGGNMDYLLTKLGVGNNQLSSLIGSGLITGNPILYDSQTQLLGIQVTLPSVGNLNNMRATYLETLSVSTTKGFASALVPKVVTQVGSVIEELDTSYCIETDLDLYCTRIVTFPMSPGIYSCLSGNTSACMYSKTEGALTTPYMTLKGSVIANCKMTTCRCADPPGIISQNYGEAVSLIDRQSCNILSLDGITLRLSGEFDATYQKNISIQDSQVIVTGNLDISTELGNVNNSISNALDKLEESNSKLDKVNVKLTSTSALITYIFLTVISLVCGILSLVLACYLMYKQKAQQKTLLWLGNNTLDQMRATTKM

SEQ ID NO: 332 - protein, 620 aa, Avian orthoavulavirus 9
MEPGISQASLVNDNIELRNTWRTAFRILSLLLGFTGLILAACALHFALNAATPADLSGIPVAIDQNRREILQTLSLMSDTDNKIYKQVALESPVALLNTESTLMSAITSLSYQINNAANNSGCGAPVHDKDFINGVAKELFVGPQYNASNYRPSKFLEHLNFIPAPTTGNGCTRIPSFDLAATHWCYTHNVILSGCNDHVHSYQYISLGILKVSATGNVFLSTLRSINLDDDENRKSCSISATPLGCDLLCAKVTETEEEDYNSDAATKLVHGRLGFDGAYHEQALPVESLFSDWVANYPTVGGGSYFDNRVWFGVYGGIRPGSQTDLLQSGKYAIYHRYNNTCPDDNSTQIERARSSYRPQRFGQRLVQQAILSIRVESSLGGDPKLSVLDNTVVLMGAEARIMTFGHVALMYQRGSSYFPSALLYPLSLTNGSATASKPYIFEQYTRPGSPPCQATARCPNSCVTGVYTDAYPLFWSDDHKVTGVYGMMLDDNTLRLNPVAAVFNRYDRSGVTRVSSSSTKAAYTTNTCFKVVKTKRVYCLSIAEIGNTLFGEFRITPLLSEIILDPSLETSDKSRNRVKSAPEDGGWTDPASIALTAGNASSLHSNVTSAGSVDSQP

SEQ ID NO: 333 - protein, 551 aa, Avian orthoavulavirus 9
MGHLHLLYIMIVITMSAHLCCTTSLDGRKLLGAGIVITEEKQVRVYTAAQSGTIVLRLLPYLSSDRYPCVESTIESYNKTVYNILAPLGDAIRRIQASDVSVESIREGRIFGAILGGVALGVATAAQITAASALIQANENAKNILRIKDSITKTNEAVRDVTEGVSQLTIAVGKLQDFVNKEFNKTTEAINCVQAAQQLGVELSLYLTEITTVFGPQITSPALSKLTIQALYNLAGGDLDVLLGKLGADNSQLSSLISSGLITGQPILYDSESQILALQVSLPSIGDLRGVRATYLDTLAVDTAAGLASAMIPKVVIQSNNIVEELDTTTCIAAEADLYCTKITTFPIASAVSACILGDVSQCLYSKTNGALTTPYVAVKGKIVANCKHVTCRCVNPTAIISQNYGEAATLIDDQLCKVINLDGVSIQLSGTFESTYVRNISISANKVIVSSSIDISNELENVNSSLSSALDKLDESDAALSKVNVHLTSTSAMITYIVLTVIALVLGVVGLGLGCFAMIKVKSQAKTLLWLGAHADRSYILQNKPAQSST

SEQ ID NO: 334 - protein, 577 aa, Avian orthoavulavirus 12; identical to SEQ ID NO: 330

SEQ ID NO: 335 - protein, 546 aa, Avian orthoavulavirus 12
MAIPVPSSTALMIFNILVSLAPASALDGRLLLGAGIVPTGDRQVNVYTSSQTGIIALKLLPNLPKDKENCAEVSIRSYNETLTRILTPLAQSMAAIRGNSTVSTRGREPRLVGAIIGGVALGVATAAQITAATALIQANQNAENIARLAKGLAATNEAVTDLTKGVGSLAIGVGKLQDYVNEQFNRTGEAIECLTIESRVGVQLSLYLTEVIGVFGDQITSPALSDISIQALYNLAGGNLNVLLQKMGIEGTQLGSLINSGLIKGRPIMYDDGNKILGIQVTLPSVGRINGARATLLEAIAVATPKGNASPLIPRAVISVGSLVEELDMTPCVLTPTDIFCTRILSYPLSDSLTTCLKGNLSSCVFSRTEGALSTPYVSVHGKIVANCKSVVCRCVEPQQIISQNYGEALSLIDESLCRILELNGVILKMDGQFTSEYTKNITIDPVQVIISGPIDISSELSQVNQSLDSALENIKESNSYLSKVNVKLISSSAMITYIVITVICLILTFVALVLGIYSYTKIRSQQKTLIWMGNNIARSKEGNRF

SEQ ID NO: 336 - protein, 579 aa, Avian orthoavulavirus 13
MQPGISEVSFVNDERSERGTWRLLFRILTIVLCLTSIGIGIPALIYSKEAATSGDIDKSLEAVKTGMSTLSSKIDESINTEQKIYRQVILEAPVSQLNMESNILSAIASLSYQIDGTSNSSGCGSPMHDQDFVGGINKEIWTTDNVNLGEITLTPFLEHLNFIPAPTTGNGCTRIPSFDLGLTHWCYTHNVILSGCQDYSSSFQYIALGVLKISATGHVFLSTMRSINLDDERNRKSCSISATSIGCDIICSLVTEREVDDYNSPAATPMIHGRLDFSGKYNEVDLNVGQLFGDWSANYPGVGGGSFLNGRVWFPIYGGVKEGTPTFKENDGKYAIYTRYNDTCPDSESEQVSRAKSSYRPSYFGGKLVQQAVLSIKIDDTLGLDPVLTISNNSITLMGAESRVLQIEGKLYFYQRGTSWFPSLVMYPLTVNDKMVRFEPPTIFDQFTRPGNHPCSADSRCPNACVTGVYTDGYPIVFHSNHSIAAVYGMQLNDVTNRLNPRSAVWYGVSMSNVIRVSSSTTKAAYTTSTCFKVKKTQRVYCLSIGEIGNTLFGEFRIVPLLLEVYSEKGKSLKSGFDG

SEQ ID NO: 337 - protein, 545 aa, Avian orthoavulavirus 13
MARFSWEIFRLSTILLIAQTCQGSIDGRLTLAAGIVPVGDRPISIYTSSQTGIIVVKLIPNLPDNKKDCAKQSLQSYNETLSRILTPLATAMSAIRGNSTTQVRENRLVGAIIGSVALGVATAAQITAATALIQANQNAANIARLANSIAKTNEAVTDLTEGLGTLAIGVGKLQDYVNEQFNNTAVAIDCLTLESRLGIQLSLYLTELMGVFGNQLTSPALTPITIQALYNLAGGNLNALLSRLGASETQLGSLINSGLIKGMPIMYDDANKLLAVQVELPSIGKLNGARSTLLETLAVDTTRGPSSPIIPSAVIEIGGAMEELDLSPCITTDLDMFCTKIISYPLSQSTLSCLNGNLSDCVFSRSEGVLSTPYMTIKGKIVANCKQVICRCMDPPQILSQNYGEALLLIDENTCRSLELSGVILKLAGTYESEYTRNLTVDPSQVIITGPLDISAELSKVNQSIDSAKENIAESNKFLSQVNVKLLSSSAMITYIVATVVCLIIAITGCVIGIYTLTKLKSQQKTLLWLGNNAEMHGSRSKTSF

SEQ ID NO: 338 - protein, 618 aa, Avian orthoavulavirus 16
MERGISEVALANDRTEEKNTWRLIFRITVLVVSVITLGLTAASLVYSMNAAQPADFDGIIPAVQQVGTLLTNSIGGMQDVLDRTYKQVALESPLTLLNMESTIMNAITSLSYQINNGGNSSGCGAPIHDPEYIGGIGKELLIDDNIDVTSFYPSAFKEHLNFIPAPTTGAGCTRIPSFDLSATHYCYTHNVILSGCQDHSRSHQYIALGVLKLSDTGNVFFSTLHSINLDDTANRKSCSISATPLGCDILCSKVTETELEDYKSEEPTPMVHGRLSFDGTYSEKDLDVNNLFSDWTANYPGVGGGSYIGNRVWYAVYGGLKPGSNTDQSQRDKYVIYKRYNNTCPDPEDYQINKAKSSYTPSYFGSKRVQQAILSIAVSPTLGSDPVLTPLSNDVVLMGAEGRVMHVGGYTYLYQRGTSYYSPALLYPLNIQDKSATASAPYKFDAFTRPGSVPCQADARCPQSCVTGVYTDPYPLIFAKDHSIRGVYGMMLNDVTARLNPIAAVFSNISRSQITRVSSSSTKAAYTTSTCFKVIKTNRIYCMSIAEISNTLFGEFRIVPLLVEILSNGGNTARSAGGTPVKESPKGWSDAIAEPLFCTPTNVTRYNADIRRYAYSWP

SEQ ID NO: 339 - protein, 551 aa, Avian orthoavulavirus 16
MIFTMYHVTVLLLLSLLTLPLGIQLARASIDGRQLAAAGIVVTGEKAINLYTSSQTGTIVVKLLPNVPQGREACMRDPLTSYNKTLTSLLSPLGEAIRRIHESTTETAGLVQARLVGAIIGSVALGVATSAQITAAAALIQANKNAENILKLKQSIAATNEAVHEVTDGLSQLAVAVGKMQDFINTQFNNTAQEIDCIRISQQLGVELNLYLTELTTVFGPQITSPALSPLSIQALYNLAGGNLDVLLSKIGVGNNQLSALISSGLISGSPILYDSQTQLLGIQVTLPSVSSLNNMRAIFLETLSVSTDKGFAAALIPKVVTTVGTVTEELDTSYCIETDIDLFCTRIVTFPMSPGIYACLNGNTSECMYSKTQGALTTPYMSVKGSIVANCKMTTCRCADPASIISQNYGEAVSLIDSSVCRVITLDGVTLRLSGSFDSTYQKNITIRDSQVIITGSLDISTELGNVNNSINNALDKIEESNQILESVNVSLTSTNALIVYIICTALALICGITGLILSCYIMYKMRSQQKTLMWLGNNTLDQMRAQTKM

SEQ ID NO: 340 - protein, 541 aa, Avian orthoavulavirus 17
MQLYSVLALALLAVQAGLGIIPSLSNTNSIDAGFVFQSERAVNIYTNSLTGSVVVKLLPNLPDHLKSCHLDVLSSYNRTLTSIFQPLGESIKHIWGNTTGGSAAGGIQSRIVGAILGGVALGVATSAQITAGVALAQSRQNAENILKLKQSIAATNDAVQEVIAGQRELVIAIGKMQDYINQALNSTIQQIDCVTAANRLGVELSLYLTQLTTAFSNQIQNPALTPLSIQALYNLAGGNLDRFLNRIGATTSNLQSIISSGLIQGQPIGYDSEKQLLILSVSVPSINAVDNLRMAQLTPIVVSTSQGLGAVVIPKYIIAIADLIEEFVADDCIFTTSDAYCTSLTTLPLSNSLQQCIRGNVSACSYSLVRGVLSTKFITLDGSVVANCQAVTCRCIDPPKIISQFAGKPLTIINSKICNVINIEQVTLRLSGHFMSQYGANLSISEGQIVVTGPLDISNELGRVNQSITNAQASINKSNQILEGVNVRLIQVPALATSLALAIAGTVLGALAIIGILVLWVTNKKQSKKIEWLLASKASKM

SEQ ID NO: 341 - protein, 599 aa, Avian orthoavulavirus 17
MLRAEELPFHLDQVSHSYTTISAMPSIMTSASSQSREHLASRDDDDDSKCTWRLVFRVSAIALLLTILGLSIATFCKIPSKDFEPIIEEAVHEITSILTPLGAGITAILDYCQKIYRQSVLETPLQLSAMQTSILQSLSALSYQISLEANGSNCGAPIHDEAFAGGIETPLFSGKFTNGKQFRVSKYIEHLNFIPAPTTGRGCTRIPSFSLSTSHGCYTHNVILDGCADHGASHQYISIGTLRVSPSGRIYFSTLRSVNLDDGVNRKSCSIAATRYGCDLLCSVVTETERSDYASNPPTRMIHGRLDFGGSYSETDINSQVIFADWAANYPGVGSGVAVDDRILFPIYGGLRAGTPSYNKNYGSYAIYQRSGDVCPDNNATQVRNAKASYIVPLFSNRLIQQAILSIRLDPGLGKDTTLHISSNNVTLMGAEARLVAIDGQVYMYQRGSSWFPAAVLYPIHRKNGTFTFGRPYIYDNFTRPGTGFCSAASRCPNTCITGVYTDAYPIIFSADKKPIGVFGTYLNHRSDRQNPRSAVFFDVTMSNATNVSTPPVGAAYTTSTCFKMTSTGRRYCISIAEIRNTIFGEYRIVPLLVEIEQV

SEQ ID NO: 342 - protein, 577 aa, Avian paraavulavirus 3
MEPTGSKVDIVPSQGTKRTCRTFYRLLILILNLIIIILTIISIYVSISTDQHKLCNNEADSLLHSIVEPITVPLGTDSDVEDELREIRRDTGINIPIQIDNTENIILTTLASINSNIARLHNATDESPTCLSPVNDPRFIAGINKITKGSMIYRNFSNLIEHVNFIPSPTTLSGCTRIPSFSLSKTHWCYSHNVISTGCQDHAASSQYISIGIVDTGLNNEPYLRTMSSRLLNDGLNRKSCSVTAGAGVCWLLCSVVTESESADYRSRAPTAMILGRFNFYGDYTESPVPASLFSGRFTANYPGVGSGTQLNGTLYFPIYGGVVNDSDIELSNRGKSFRPRNPTNPCPDPEVTQSQRAQASYYPTRFGRLLIQQAILACRISDTTCTDYYLLYFDNNQVMMGAEARIYYLNNQMYLYQRSSSWWPHPLFYRFSLPHCEPMSVCMITDTHLILTYATSRPGTSICTGASRCPNNCVDGVYTDVWPLTEGTTQDPDSYYTVFLNSPNRRISPTISIYSYNQKISSRLAVGSEIGAAYTTSTCFSRTDTGALYCITIIEAVNTIFGQYRIVPILVQLISD

SEQ ID NO: 343 - protein, 543 aa, Avian paraavulavirus 3
MQPGSALHLPHLYIIIALVSDGTLGQTAKIDRLIQAGIVLGSGKELHISQDSGTLDLFVRLLPVLPSNLSHCQLEAITQYNKTVTRLLAPIGKNLEQVLQARPRGRLFGPIIGSIALGVATSAQITAAIALVRAQQNANDILALKNALQSSNEAIRQLTYGQDKQLLAISKIQKAVNEQILPALDQLDCAVLGTKLAVQLNLYLIEMTTIFGEQINNPVLATIPLSYILRLTGAELNNVLMKQARSSLSLVQLVSKGLLSGQVIGYDPSVQGLIIRVNLMRTQKIDRALVYQPYVLPITLNSNIVTPIAPECVIQKGTIIEGMSRKDCTELEQDIICRTVTTYTLARDTRLCLQGNISSCRYQQSGTQLHTPFITYNGAVIANCDLVSCRCLRPPMIITQVKGYPLTIITRSVCQELSVDNLVLNIETHHNFSLNPTIIDPLTRVIATTPLEIDSLIQEAQDHANAALAKVEESDKYLRAVTGGNYSNWYIVLVIVLLFGNLGWSLLLTVLLCRSRKQQRRYQQDDSVGSERGVGVGTIQYMS

SEQ ID NO: 344 - protein, 566 aa, Avian paraavulavirus 4
MRLSRTILTLILGTLTGYLMDAHSTTANERPKSEGIRGDLIPGAGIFVTQVRQLQIYQQSGYHDLVIRLLPLLPAELNDCQREVVTEYNNTVSQLLQPIKTNLDTLLADGGTRDADIQPRFIGAIIATGALAVATVAEVTAAQALSQSKTNAQNILKLRDSIQATNQAVFEISQGLDATATVLSKLQTELNENIIPSLNNLSCAAMGNRLGVSLSLYLTLMTTLFGDQITNPVLTPISYSTLSAMAGGHIGPVMSKILAGSVTSQLGAEQLIASGLIQSQVVGYDSQYQLLVIRVNLVRIQEVQNTRVVSLRTLAVNRDGGLYRAQVPPEVVERSGIAERFYADDCVLTTTDYICSSIRSSRLNPELVKCLSGALDSCTFERESALLSTPFFVYNKAVVANCKAATCRCNKPPSIIAQYSASALVTITTDTCADLEIEGYRFNIQTESNSWVAPNFTVSTSQIVSVDPIDISSDIAKINSSIEAAREQLELSNQILSRINPRIVNDESLIAIIVTIVVLSLLVIGLIVVLGVMYKNLKKVQRAQAAMMMQQMSSSQPVTTKLGTPF

SEQ ID NO: 345 - protein, 569 aa, Avian paraavulavirus 4
MQGDMEGSRDNLTVDDELKTTWRLAYRVVSLLLMVSALIISIVILTRDNSQSIITAINQSYDADSKWQTGIEGKITSIMTDTLDTRNAALLHIPLQLNTLEANLLSALGGYTGIGPGDLEHCRYPVHDSAYLHGVNRLLINQTADYTAEGPLDHVNFIPAPVTTTGCTRIPSFSVSSSIWCYTHNVIETGCNDHSGSNQYISMGVIKRAGNGLPYFSTVVSKYLTDGLNRKSCSVAAGSGHCYLLCSLVSEPEPDDYVSPDPTPMRLGVLTRDGSYTEQVVPERIFKNIWSANYPGVGSGAIAGNKVLFPFYGGVKNGSTPEVMNRGRYYYIQDPNDYCPDPLQDQILRAEQSYYPTRFGRRMVMQGVLTCPVSNNSTIASQCQSYYFNNSLGFIGAESRIYYLNGNIYLYQRSSSWWPHPQIYLLDSRIASPGTQNIDSGVNLKMLNVTVITRPSSGFCNSQSRCPNDCLFGVYSDVWPLSLTSDSIFAFTMYLQGKTTRIDPAWALFSNHVIGHEARLFNKEVSAAYSTTTCFSDTIQNQVYCLSILEVRSELLGAFKIVPFLYRVL

SEQ ID NO: 346 - protein, 621 aa, Synodus synodonvirus
MKRVLDWVHQKMARKGLDPINPTIKVGRDGTEVDQGLAIYIARVTVSILAIILLTVLLVTPTVTGLFQVFDSSASEQSHPIMDLLNDEVLPPLRNTHALLEEDTAPRVRSIQTAVELRIPGDLKSATQQILHAIKDTCVGGDGGGTGPAPSCPPEGVLPQHHSAFKPIDPDSFTPCATGKPTFSGSPAASSSIGSFPWISSGTQDTPKISMTMSSSYLGFYATDTYITTGQNKRSVSVIGLGRLTVTEDGRSSAVVTEAEPIHHSSLIGYQSTGTGITGTVSFFRTTGSEDTADAQDVGIRSHTLLVMRRNRKLDTYVYEGGEIQGGDMYMMASPLSGQGTMVGDEMVLLGYAVPVTNYAGPVWCPNTFCNTQTMEACKNASGTIRFPGSSTGLAVVMVRYMIQDLDKDGFKPKITIHMLNREQWPIPGPYHLTSGTKGLFISVYSWGWYGHPVSGEINRATWDMRSIRLVYALLWPDLPETEGKCYTNLANPCPRACTIGSTRIGSGIPLTFTGQLSAWLTISADGGATRLKPEVAVSYSDPSYHDLVERTYPYTTAATFTAVEGSITCFMVSGLPQCITLIEGDSSAYATNLQTYNLWSLPIDCPSTRNLTLTTNTTSP

SEQ ID NO: 347 - protein, 546 aa, Synodus synodonvirus
MWPILFLCVGLMSCVAQSALLDQSKVAPVGVFFTDPYKLKITGPETTKLMVIRLIPSLGAAQTCTQPSIDEYKLLMTSVITPIQAVLARTMAAVDVTEQNTTSRIAGVIVGSVALGVATSAQITAGIALHNSQENAKAIAAMGNAITATNTAVQNLITAQGQTVTVINTMQDQVNNDIIPAINTLACSISQNRMSIILGQFFSFVQVAFGPVIQSPINSPITVQALNTLFGGDLSRFMEALGYSPGDLSDVLATGSATVRVIAVDPVLFTLTLEASFPTIIDYPGSSIIPIQAITFSTNGSEWLTQTPPWIHTKETQVSGFDPSMCKLTDTSMVCPRDTTYSLSDSVLTCLSGVTSTCPKIRVLNGLSPRYVVYKGVVIANCRATSCVCTDTGRPIAPLSGTLLTEINQEMCSVIGVDGVLIRAEQKLEGVSWGVSIAALGPTIQLDPVDISSEMGAINHSINAAQKALDESKRILQHINPDIVNTESAIATIVLAVLSLVMIFFGAVALIYLHKKINNLAQAQRIASFQMSPTLAHRNYAPRHRG

SEQ ID NO: 348 - protein, 576 aa, Salmo aquaparamyxovirus
MPPAPSPVHDPSSFYGSSLFNEDTASRKGTSEEIHLLGIRWNTVLIVLGLILAIIGIGIGASSFSASGITGNTTKEIRLIVEEMSYGLVRISDSVRQEISPKVTLLQNAVLSSIPALVTTETNTIINAVKNHCNSPPTPPPPTEAPLKKHETGMAPLDPTTYWTCTSGTPRFYSSPNATFIPGPSPLPHTATPGGCVRIPSMHIGSEIYAYTSNLIASGCQDIGKSYQNVQIGVLDRTPEGNPEMSPMLSHTFPINDNRKSCSIVTLKRAAYIYCSQPKVTEFVDYQTPGIEPMSLDHINANGTTKTWIYSPTEVVTDVPYASMYPSVGSGVVIDGKLVFLVYGGLLNGIQVPAMCLSPECPGIDQAACNASQYNQYLSGRQVVNGIATVDLMNGQKPHISVETISPSKNWFGAEGRLVYMGGRLYIYIRSTGWHSPIQIGVIYTMNPLAITWVTNTVLSRPGSAGCDWNNRCPKACLSGVYTDAYPISPDYNHLATMILHSTSTRSNPVMVYSSPTNMVNYAQLTTTAQIAGYTTTSCFTDNEVGYCATALELTPGTLSSVQPILVMTKIPKECV

SEQ ID NO: 349 - protein, 552 aa, Salmo aquaparamyxovirus
MDGPKFRFVLLILLTAPARGQVDYDKLLKVGIFEKGTANLKISVSSQQRYMVIKMMPNLGPMNQCGIKEVNLYKESILRLITPISTTLNYIKSEIQVEREVALQPNGTIVRFFGLIVAAGALTLATSAQITAGIALHNSLENAKAIKGLTDAIKESNLAIQKIQDATAGTVIALNALQDQVNTNIIPAINTLGCTAAGNTLGIALTRYYSELIMIFGPSLGNPVEAPLTIQALAGAFNGDLHGMIREYGYTPSDIEDILRTNSVTGRVIDVDLVGMNIVLEINLPTLYTLRDTKIVNLGKITYNVDGSEWQTLVPEWLAIRNTLMGGVDLSRCVVSSRDLICKQDPVFSLDTSIISCLNGNTESCPRNRVVNSVAPRYAVIRGNILANCISTTCLCGDPGVPIIQKGDNTLTAMSINDCKLVGVDGYVFRPGPKAVNVTFNLPHLNLGPEVNVNPVDISGALGKVEQDLASSRDHLAKSEKILSGINPNIINTEMVLVAVILSLVCAMVVIGIVCWLSILTKWVRSCRADCRRPNKGPDLGPIMSSQDNLSF

SEQ ID NO: 350 - protein, 564 aa, Reptilian ferlavirus
MDPKSYYCNEDLRSDGGEKSPGGDLYKGIILVSTVISLIIAIISLAFIIDNKINIQSLDPLRGLEDSYLVPIKDKSESISQDIQEGIFPRLNLITAATTTTIPRSIAIQTKDLSDLIMNRCYPSVVNNDTSCDVLAGAIHSNLFSQLDPSTYWTCSSGTPTMNQTVKLLPDNSQIPGSTYSTGCVRIPTFSLGSMIYSYSHNVIYEGCNDHSKSSQYWQLGYISTSKTGEPLQQVSRTLTLNNGLNRKSCSTVAQGRGAYLLCTNVVEDERTDYSTEGIQDLTLDYIDIFGAERSYRYTNNEVDLDRPYAALYPSVGSGTVYNDRILFLGYGGLMTPYGDQAMCQAPECTSATQEGCNSNQLIGYFSGRQIVNCIIEIITVGTEKPIIRVRTIPNSQVWLGAEGRIQTLGGVLYLYIRSSGWHALAQTGIILTLDPIRISWIVNTGYSRPGNGPCSASSRCPAQCITGVYTDIFPLSQNYGYLATVTLLSGVDRVNPVISYGTSTGRVADSQLTSSSQVAAYTTTTCFTFNQKGYCYHIIELSPATLGIFQPVLVVTEIPKICS

SEQ ID NO: 351 - protein, 545 aa, Reptilian ferlavirus
MTRITILQIILTLTLPVMCQVSFDNLEQVGVMFDKPKFLKITGPASTATMIIKLIPTLGTMESCGTSAVNEYKKTLDTILVPLRDTINKLSTDITVVEGTSNISNKREKRFVGIAIAVGAVALATSAQITAGIALSNTIKNAEAIESIKSSIQASNQAIQKVIDAQGRTVTVINGIQDHINSVINPALNQLGCDVAKNTLAISLTQYFSKLSLLFGPNLRNPVEQPLSVQAIAGLMDGDINAVVSQLGYTQSDLLDLLSTESIVGTVTAIDMVNYMIQIEMSFPQYITIPDTKVLEGHKITFNDKGSEWQTQVPSTIAVRDILIAGVDPDGCSITSTSYICKNDPTYAMSEVLTNCFRGNTQECPRARITSTFATRFAIARSTVIANCVAAVCLCGDPGIPVVQKAEVTLTAMTLDQCSLITVDGLQIKPSKSIANVTANFGNITLGPVVSVGDLDLSAELTKVQSDLKEAQDKLDESNAILQGINNKILTAPTSIALIVVSVVVILLIIGMISWLVWLTKAVRRSNTRSERVTPSAYNNLGFIK

SEQ ID NO: 352 - protein, 622 aa, Cedar henipavirus
MLSQLQKNYLDNSNQQGDKMNNPDKKLSVNFNPLELDKGQKDLNKSYYVKNKNYNVSNLLNESLHDIKFCIYCIFSLLIIITIINIITISIVITRLKVHEENNGMESPNLQSIQDSLSSLTNMINTEITPRIGILVTATSVTLSSSINYVGTKTNQLVNELKDYITKSCGFKVPELKLHECNISCADPKISKSAMYSTNAYAELAGPPKIFCKSVSKDPDFRLKQIDYVIPVQQDRSICMNNPLLDISDGFFTYIHYEGINSCKKSDSFKVLLSHGEIVDRGDYRPSLYLLSSHYHPYSMQVINCVPVTCNQSSFVFCHISNNTKTLDNSDYSSDEYYITYFNGIDRPKTKKIPINNMTADNRYIHFTFSGGGGVCLGEEFIIPVTTVINTDVFTHDYCESFNCSVQTGKSLKEICSESLRSPTNSSRYNLNGIMIISQNNMTDFKIQLNGITYNKLSFGSPGRLSKTLGQVLYYQSSMSWDTYLKAGFVEKWKPFTPNWMNNTVISRPNQGNCPRYHKCPEICYGGTYNDIAPLDLGKDMYVSVILDSDQLAENPEITVFNSTTILYKERVSKDELNTRSTTTSCFLFLDEPWCISVLETNRFNGKSIRPEIYSYKIPKYC

SEQ ID NO: 353 - protein, 557 aa, Cedar henipavirus
MSNKRTTVLIIISYTLFYLNNAAIVGFDFDKLNKIGVVQGRVLNYKIKGDPMTKDLVLKFIPNIVNITECVREPLSRYNETVRRLLLPIHNMLGLYLNNTNAKMTGLMIAGVIMGGIAIGIATAAQITAGFALYEAKKNTENIQKLTDSIMKTQDSIDKLTDSVGTSILILNKLQTYINNQLVPNLELLSCRQNKIEFDLMLTKYLVDLMTVIGPNINNPVNKDMTIQSLSLLFDGNYDIMMSELGYTPQDFLDLIESKSITGQIIYVDMENLYVVIRTYLPTLIEVPDAQIYEFNKITMSSNGGEYLSTIPNFILIRGNYMSNIDVATCYMTKASVICNQDYSLPMSQNLRSCYQGETEYCPVEAVIASHSPRFALTNGVIFANCINTICRCQDNGKTITQNINQFVSMIDNSTCNDVMVDKFTIKVGKYMGRKDINNINIQIGPQIIIDKVDLSNEINKMNQSLKDSIFYLREAKRILDSVNISLISPSVQLFLIIISVLSFIILLIIIVYLYCKSKHSYKYNKFIDDPDYYNDYKRERINGKASKSNNIYYVGD

SEQ ID NO: 354 - protein, 632 aa, Ghanaian bat henipavirus
MPQKTVEFINMNSPLERGVSTLSDKKTLNQSKITKQGYFGLGSHSERNWKKQKNQNDHYMTVSTMILEILVVLGIMFNLIVLTMVYYQNDNINQRMAELTSNITVLNLNLNQLTNKIQREIIPRITLIDTATTITIPSAITYILATLTTRISELLPSINQKCEFKTPTLVLNDCRINCTPPLNPSDGVKMSSLATNLVAHGPSPCRNFSSVPTIYYYRIPGLYNRTALDERCILNPRLTISSTKFAYVHSEYDKNCTRGFKYYELMTFGEILEGPEKEPRMFSRSFYSPTNAVNYHSCTPIVTVNEGYFLCLECTSSDPLYKANLSNSTFHLVILRHNKDEKIVSMPSFNLSTDQEYVQIIPAEGGGTAESGNLYFPCIGRLLHKRVTHPLCKKSNCSRTDDESCLKSYYNQGSPQHQVVNCLIRIRNAQRDNPTWDVITVDLTNTYPGSRSRIFGSFSKPMLYQSSVSWHTLLQVAEITDLDKYQLDWLDTPYISRPGGSECPFGNYCPTVCWEGTYNDVYSLTPNNDLFVTVYLKSEQVAENPYFAIFSRDQILKEFPLDAWISSARTTTISCFMFNNEIWCIAALEITRLNDDIIRPIYYSFWLPTDCRTPYPHTGKMTRVPLRSTYNY

SEQ ID NO: 355 - protein, 662 aa, Ghanaian bat henipavirus
MKKKTDNPTISKRGHNHSRGIKSRALLRETDNYSNGLIVENLVRNCHHPSKNNLNYTKTQKRDSTIPYRVEERKGHYPKIKHLIDKSYKHIKRGKRRNGHNGNIITIILLLILILKTQMSEGAIHYETLSKIGLIKGITREYKVKGTPSSKDIVIKLIPNVTGLNKCTNISMENYKEQLDKILIPINNIIELYANSTKSAPGNARFAGVIIAGVALGVAAAAQITAGIALHEARQNAERINLLKDSISATNNAVAELQEATGGIVNVITGMQDYINTNLVPQIDKLQCSQIKTALDISLSQYYSEILTVFGPNLQNPVTTSMSIQAISQSFGGNIDLLLNLLGYTANDLLDLLESKSITGQITYINLEHYFMVIRVYYPIMTTISNAYVQELIKISFNVDGSEWVSLVPSYILIRNSYLSNIDISECLITKNSVICRHDFAMPMSYTLKECLTGDTEKCPREAVVTSYVPRFAISGGVIYANCLSTTCQCYQTGKVIAQDGSQTLMMIDNQTCSIVRIEEILISTGKYLGSQEYNTMHVSVGNPVFTDKLDITSQISNINQSIEQSKFYLDKSKAILDKINLNLIGSVPISILFIIAILSLILSIITFVIVMIIVRRYNKYTPLINSDPSSRRSTIQDVYIIPNPGEHSIRSAARSIDRDRD

SEQ ID NO: 356 - protein, 604 aa, Hendra henipavirus
MMADSKLVSLNNNLSGKIKDQGKVIKNYYGTMDIKKINDGLLDSKILGAFNTVIALLGSIIIIVMNIMIIQNYTRTTDNQALIKESLQSVQQQIKALTDKIGTEIGPKVSLIDTSSTITIPANIGLLGSKISQSTSSINENVNDKCKFTLPPLKIHECNISCPNPLPFREYRPISQGVSDLVGLPNQICLQKTTSTILKPRLISYTLPINTREGVCITDPLLAVDNGFFAYSHLEKIGSCTRGIAKQRIIGVGEVLDRGDKVPSMFMTNVWTPPNPSTIHHCSSTYHEDFYYTLCAVSHVGDPILNSTSWTESLSLIRLAVRPKSDSGDYNQKYIAITKVERGKYDKVMPYGPSGIKQGDTLYFPAVGFLPRTEFQYNDSNCPIIHCKYSKAENCRLSMGVNSKSHYILRSGLLKYNLSLGGDIILQFIEIADNRLTIGSPSKIYNSLGQPVFYQASYSWDTMIKLGDVDTVDPLRVQWRNNSVISRPGQSQCPRFNVCPEVCWEGTYNDAFLIDRLNWVSAGVYLNSNQTAENPVFAVFKDNEILYQVPLAEDDTNAQKTITDCFLLENVIWCISLVEIYDTGDSVIRPKLFAVKIPAQCSES

SEQ ID NO: 357 - protein, 546 aa, Hendra henipavirus; identical to SEQ ID NO: 102

SEQ ID NO: 358 - protein, 625 aa, Mojiang henipavirus
MATNRDNTITSAEVSQEDKVKKYYGVETAEKVADSISGNKVFILMNTLLILTGAIITITLNITNLTAAKSQQNMLKIIQDDVNAKLEMFVNLDQLVKGEIKPKVSLINTAVSVSIPGQISNLQTKFLQKYVYLEESITKQCTCNPLSGIFPTSGPTYPPTDKPDDDTTDDDKVDTTIKPIEYPKPDGCNRTGDHFTMEPGANFYTVPNLGPASSNSDECYTNPSFSIGSSIYMFSQEIRKTDCTAGEILSIQIVLGRIVDKGQQGPQASPLLVWAVPNPKIINSCAVAAGDEMGWVLCSVTLTAASGEPIPHMFDGFWLYKLEPDTEVVSYRITGYAYLLDKQYDSVFIGKGGGIQKGNDLYFQMYGLSRNRQSFKALCEHGSCLGTGGGGYQVLCDRAVMSFGSEESLITNAYLKVNDLASGKPVIIGQTFPPSDSYKGSNGRMYTIGDKYGLYLAPSSWNRYLRFGITPDISVRSTTWLKSQDPIMKILSTCTNTDRDMCPEICNTRGYQDIFPLSEDSEYYTYIGITPNNGGTKNFVAVRDSDGHIASIDILQNYYSITSATISCFMYKDEIWCIAITEGKKQKDNPQRIYAHSYKIRQMCYNMKSATVTVGNAKNITIRRY

SEQ ID NO: 359 - protein, 545 aa, Mojiang henipavirus
MALNKNMFSSLFLGYLLVYATTVQSSIHYDSLSKVGVIKGLTYNYKIKGSPSTKLMVVKLIPNIDSVKNCTQKQYDEYKNLVRKALEPVKMAIDTMLNNVKSGNNKYRFAGAIMAGVALGVATAATVTAGIALHRSNENAQAIANMKSAIQNTNEAVKQLQLANKQTLAVIDTIRGEINNNIIPVINQLSCDTIGLSVGIRLTQYYSEIITAFGPALQNPVNTRITIQAISSVFNGNFDELLKIMGYTSGDLYEILHSELIRGNIIDVDVDAGYIALEIEFPNLTLVPNAVVQELMPISYNIDGDEWVTLVPRFVLTRTTLLSNIDTSRCTITDSSVICDNDYALPMSHELIGCLQGDTSKCAREKVVSSYVPKFALSDGLVYANCLNTICRCMDTDTPISQSLGATVSLLDNKRCSVYQVGDVLISVGSYLGDGEYNADNVELGPPIVIDKIDIGNQLAGINQTLQEAEDYIEKSEEFLKGVNPSIITLGSMVVLYIFMILIAIVSVIALVLSIKLTVKGNVVRQQFTYTQHVPSMENINYVSH

SEQ ID NO: 360 - protein, 602 aa, Nipah henipavirus; identical to SEQ ID NO: 101

SEQ ID NO: 361 - protein, 546 aa, Nipah henipavirus; identical to SEQ ID NO: 100

SEQ ID NO: 362 - protein, 544 aa, Beilong jeilongvirus
MKVTILTAYIAASVFTCCHSQLALSELTKIGIIPGRSYDLKTSTQASYQYMVIKLIPNVNGLNNCTNSTVESYKKMLTRLLNPIDVALKKMKNAVSDKAPEKLGNVKFWGAVIGGVALGVATSAQITAGVALHNSIQNANAILTLKDSIRQSNKAIQELQTAMSTTVVVLNALQDQINNQLAPAINSLGCQVVANTLGLKLNQYFSEISLVFGPNLRDPTSETLSIQALSRAFNGDFDSMLSRLKYDDSDFLDLLESDSIRGRIIDVSLEDYLITIQIEYPALLTIKDAIIQTFNLISYNTRGTEWISIFPKQLLVRGTYISNIDISQCVLAATSIICKSDTSTPISSATWACATGNVTSCARTRVVNAHVPRFALSGGVIFANCAPVVCKCQDPLYSINQEPKVTNVMVDVDACKEMYLDGLYITLGKSQLPRAMYAEDVSLGGPISVDLIDLGNEINSINSAINRSEEHLDHANELLDQVNPKIVNVKTFGVMLGLLLLLILWCVVTLVWLICLTKQVSRVSFGGSMGSRASTVNSLSGFVG

SEQ ID NO: 363 - protein, 734 aa, Beilong jeilongvirus
MSQLAAHNLAMSNFYGTHQGDLSGSQKGEEQQVQGVIRYVSMIVSLLSLFTIIALNVTNIIYMTESGGTMQSIKTAQGSIDGSMREISGVIMEDVKPKTDLINSMVSYNIPAQLSMIHQIIKNDVPKQCTPSFMFNNTICPLAENPTHSRYFEEVNLDSISECSGPDMHLGLGVNPEFIEFPSFAPGSTKPGSCVRLPSFSLSTTVFAYTHTIMGHGCSELDVGDHYFSVGRIADAGHEIPQFETISSWFINDKINRRSCTVAAGAMEAWMGCVIMTETFYDDRNSLDTGKLTISYLDVFGRKKEWIYTRSEILYDYTYTSVYFSVGSGVVVGDTVYFLIWGSLSSPIEETAYCFAPDCSNYNQRMCNEAQRPSKFGHRQMVNGILKFKTTSTGKPLLSVGTLSPSVVPFGSEGRLMYSEITKIIYLYLRSTSWHALPLTGLFVLGPPTSISWIVQRAVSRPGEFPCGASNRCPKDCVTGVYTDLFPLGSRYEYAATVYLNSETYRVNPTLALINQTNIIASKKVTTESQRAGYTTTTCFVFKLRVWCISVVELAPSTMTAYEPIPFLYQLDLTCKGKNGSLAMRFAGKEGTYKSGRYKSPRNECFFEKVSNKYYFIVSTPEGIQPYEIRDLTPDRMPHIIMYISDVCAPALSAFKKLLPAMRPITTLTIGNWQFRPVEVSGGLRVNIGRNLTKEGDLTMSAPEDPGSNTFPGNHIPGNGILDAGYYTVEYPKE

SEQ ID NO: 364 - protein, 544 aa, Jun jeilongvirus
MKPVALIYLTILAFTVKVRSQLALSDLTKIGIIPAKSYELKISTQAAQQLMVIKLIPNVNGLTNCTIPVMDSYKKMLDRILKPIDDALNHVKNAIQDKQGDGVPGVRFWGAIIGGVALGVATSAQITAGVALHNSIQNANAILQLKESIRNSNKAIEELQAGLQSTVLVINALQDQINSQLVPAINTLGCSVIANTLGLRLNQYFSEISLVFGPNLRDPTSQTLSIQAIAKAFNGDFDSMMKKMHYTDSDFLDLLESDSIRGRIISVSLEDYLIIIQIDYPGLTTIPNSVVQTFNLITYNYKGTEWESIFPRELLIRGSYISNIDISQCVGTSKSMICKSDTSTTISPATWACATGNLTSCARTRVVNSHSTRFALSGGVLFANCAPIACRCQDPQYSINQEPKTTNVMVTSEDCKELYIDGFYLTLGKKMLDRAMYAEDVALGGSVSVDPIDIGNELNSINESINKSHEYLDKANELLEQVNPNIVNVSSFSFILVISILLIIWFIVTLVWLIYLTKHMNFIVGKVAMGSRSSTVNSLSGFVG

SEQ ID NO: 365 - protein, 709 aa, Jun jeilongvirus
MNPVAMSNFYGINQADHLREKGDQPEKGPSVLTYVSLITGLLSLFTIIALNVTNIIYLTGSGGTMATIKDNQQSMSGSMRDISGMLVEDLKPKTDLINSMVSYTIPSQISAMSAMIKNEVLRQCTPSFMFNNTICPIAEHPVHTSYFEEVGIEAISMCTGTNRKLVVNQGINFVEYPSFIPGSTKPGGCVRLPSFSLGLEVFAYAHAITQDDCTSSSTPDYYFSVGRIADHGTDVPVFETLAEWFLDDKMNRRSCSVTAAGKGGWLGCSILVGSFTDELTSPEVNRISLSYMDTFGKKKDWLYTGSEVRADQSWSALFFSVGSGVVIGDTVYFLVWGGLNHPINVDAMCRAPGCQSPTQSLCNYAIKPQEWGGNQIVNGILHFKHDTNEKPTLHVRTLSPDNNWMGAEGRLFHFHNSGKTFIYTRSSTWHTLPQVGILTLGWPLSVQWVDITSISRPGQSPCEYDNRCPHQCVTGVYTDLFPLGVSYEYSVTAYLDQVQSRMNPKIALVGAQEKIYEKTITTNTQHADYTTTSCFAYKLRVWCVSIVEMSPGVITTRQPVPFLYHLNLGCQDTSTGSLTPLDAHGGTYLNTDPVGNKVDCYFVLHEGQIYFGMSVGPINYTYSIVGRSREIGANMNVSLNQLCHSVYTEFLKEKEHPGTRNNIDVEGWLLKRIETLNGTKIFGLDDLEGSGPGHQSGPEDPSIAPIGHN

SEQ ID NO: 366 - protein, 546 aa, Lophuromys jeilongvirus 1
MKHRRDMLMTKALLIIIILIGPLSSQISFTNLSKIGVIKGKNYKLKITSNPTYQFMVLKMIPNVVNMSQCGQDHLDNYKGMLKRILQPISDSINLMRSVIQDKPNNGRFWGALVGGVALGVATSAQVTAGVALHNSLENARAILQLKDAIQATNQAVQEVISAQRKSVLVINALQDQINGNIVPAIKSLGCKVAGNTFGLRLTQYFSEVSLVFGPNLRDPAAETLSIQAISRAFNGDFDSLLKALGYKESDLMDVLESGSIRGRIIDVSLDNYFLIIQIEYPTLVNIPDATVQKFNLISYNYDGSEWLSVFPKALLKRGSYLSNIDLSDCTQTTNTILCPQDTSSPLTQNLYDCATGKISQCARMRVVNSHVSRYALSDGVLFLNCIPINCRCSDPEYAIIQEPTTTTLMMSYDDCREVMVEGIFVTVGKKTLNRTSYTGEVDVGGIVTLDPIDISTDVADIQDTLDKAQEEIDKSNEILSKVNPNIITLGGFVSIISFTTLFGIYCVVSLIWLICLTKRTSRPYAMMTFRNRSPTITTLSSNMTS

SEQ ID NO: 367 - protein, 854 aa, Lophuromys jeilongvirus 1
MADYYKTGGIITPVKKPTEEERNHKSNVLAYTSLILGILSVIVLILLNITNITMTIKKDSINGALNSKPIMTETQGNKISDLIESDLIPKTNLINNMVSYQIPTSLTQIYSLIKRDVLQACTPKFDHEGSQCPVNSNPFHSGSFSLINRNTFSRCPDPNNNLGMRESIKLMDYPSFIPGPTRPGGCSRDPSFDLGNKIFAYTHNVVPQGCGYTEMTMQYFNIGRVTDVNADMPFFEILTQWYLDDGLNRKSCTVVTSDEGAWILCIVTSESEEKDYADQGIGRVFIGYMDIYGRKKSWYLDEPEIQFDLPMAAMYFSGGSGVSDEGKIYVLIYGGLMTAVSGDVFCDAPGCDNPSQDMCKKASMPKSRSQRQMVNGLFIFDDNPLEAPKPIVKLIPPSQNWVGSRGRLYKSDYPKIFFLYISSDSWHSLPKIGIIAVGDQTYLHWVENVAVSRPGPENCMYGNRCPQECLGAPYTDIFPLDSNFEIGISVTLKSYQVNKNPVITLVTQNKIISETEVTNDHHGAQYTTTSCFKYARSLWCLSIVAFEPATVGERAPVPLLYKVPVYCKASGTRLTIPIPYFSNGSRPIVVLTNELYPPEVPKFQTQDDFNKLQLSPYHFERPGTTGPPSTTSKLQTTRSLHVDTSTQVIKQVTPTTLSEPTTREQTPTTANTLSTKEMLTTVKTIDENTTRITAQHHDTTQRSTITTLNKTAQTTEGTGQHQITTHNITRRDTTPNTDGHSISTARQPNIQSHTAKDENTPDIYNNVRRIGIQRETKTSRSRDRRPKKQKLDDYASKDQHNTFEDQGLWDKISSYLLPIQSDYYGIEDPELDSIDLFDYRHVTSSSHNRVMIYQ

SEQ ID NO: 368 - protein, 549 aa, Lophuromys jeilongvirus 2
MTKLYYISIIIVVIAINLHYIEAQISLAELSKIGIIQGNNYGLKVSGVSTYQLMVIKLIPNVSQLSNCTTDVMVSYKGMLDRILNPINSSLAKVRAAIKDKVDYTPSRNGERFWGAIVGGVALGVATAAQVTAGVALHNSLENAKAIMQLKDAIRNSNAAIQELTTSQGQVVVAINALQEQINTQLVPSLNQLGCSVIGNTLGLKLNQYFSELSLIFGPNLRDPTSETLSIQAIARAFNGDFDTMLNKLKYDTSDFLDLLESGGIRGRIIDVSLTDYIISLQIEYPTLTAIPDATVQLFNLISYNHRGSEWMSVFPRQMLIRGSYLSNIDLSECVQTSSNYICSTDTSSALSSGTYECATGNITSCARTRVVNSHVSRFALSKGVLFVNCASIVCRCQDPKYTIIQDTQVTNVMISSQDCKEVYIDGYFITLGPKTLERSMYSDNVTLGGTVSVEIIDIGNELNSIQESLNRTQHYIDKSNEILDRVNPNVINLGTIGGIMFLTILATIWFIISLIWLICLTRKIMIPRSNLTTSSRSSTVNSLAGFIN

SEQ ID NO: 369 - protein, 810 aa, Lophuromys jeilongvirus 2
MIMNPINTQMTNYYGVGGNKDREAIQTSSTNSTCHSALTYTSMIVGLLSLFTLIALNVTNITYLIGSGGSMNAIKEKQESLGALVRDSVSLTTEEIKPKVDLINNIVSYSIPSQLTQIQHTIKNEVLRQCGPSFVYNNTVCPVVENPSHSQHFKMINPYTISECANTGSFIQVKSHISFIDYPSFIPGSTRKGGCVRIPSFSLSDTIFAYAHNIIAQGCQDSSQSDQYLSIGRIEDHGTDIPVIETIAEWYLNDGLNRKSCSVASGDTYAIMGCTIVTSDERTDYLNPGIGRLSITYLDVFGRKKEWIFTQEEIELDREYLALYFSVGSGVIIDDEIYFLVYGDLAEPMPGNVFCHAPGCAAVNQDVCNAATKPNWFGRHQIVNGILSFTADFESRPRLRVRTIPPSKTWLGAEGRLMYSTVARKTYIYVRSTGWHALAQTGIIDLTGDLSIQWVDQLVLSRPGTSGCPAANRCPKECVTGVYTDAFPLGVNYDVSVSVVLATQSTRSNPRLMVVNGTNIIYVKTVTSASQKASYTTTTCFVFKMRIWCLSIIELSPGAVGEFVPVPFLYQLNLGCVDKDTGVTEQLSSYSGKDTYTLTPYETPKTECYLELSGDDMYFAVKVFGNHQSYRLTWKAQAKTTEDIATVSQLCHEVLKYMTDRGDVFNNNTVVDTEHVTLTPVTLSAGTRVTLTKTDSTPVANETTSMSTAIKATLDRTTRSVTTRLTESTAFNHTSSVLNQITVTPTSSTTEANHTSTPITRVSQHETSSVVTHGQLNNTLNATGSWRLRYSNLFERGYSEMMKWWGNNGD

SEQ ID NO: 370 - protein, 544 aa, Myodes jeilongvirus
MSKLRAAVLLLIMIPSLCRSQLALSELTKIGIIPGKSYDLKLSTQSTYQYMVIKLIPNLNNMTKCTIDTLDNYKNMLSRVLNPIHDSLKKMKDAVQDKEPANMPPVKFWGAVIGGVALGVATSAQITAGVALHNSIQNANAILQLKDSIRQSNKAIAELQTASRTTVTVLNALQEQINTQLVPAINNLGCQVVANTLGLRLNQYFSEISLIFGPNLRDPTSETLSIQALSKAFNGDFDSMISQLKYTDKDFLDVLESDSIRARIIDVSLEDYFITLQIEYPSLVQVSDAVVQTFNKISYNHRGSEWISLFPTQLLIRGMYISNIDISMCTMTSTSLICKSDTSSPISTATWSCANGNLTSCARTRVVNAHIPRFALSRGVLFANCAPIVCKCSDPPMNINQEPKMTNVMVSSDECREVYVDGLYITLGKRTLPRSMYAEDVSLGGPISVDPIDIGNELNSIHDSLNKSQEYLDEANALLDKVNPRIINVQTFGVMLAFIILLIIWVIATIIWLIYLTKSIHYLNRHVSLSSRGSTVTSLSGFVG

SEQ ID NO: 371 - protein, 1589 aa, Myodes jeilongvirus
MNPLAVHTAAMSNFYGVNATQTTDARKENHIGGQDVFRYTSMIVGLLSLFTIIALNVTNIIYLTESGGTMESIKNSQQSLSGSMKETTGILIEDLKPKTDLINSMVGYNIPTQLSLIYSTIKNDVLKQCTPTFMFNNTICPVAEHPIHSSYFEEINLSSFAACALPNGRVVMNSEVTYTEYPSFIPGSTSPGSCVRLPSFSLSPTIFAYSHTIMGHGCSELDVGDHYFSLGRIADHGHENPVFETITEWFINDKVNRRSCTVAAGQYEGWMGCVIMTETFLDDLSSRDTGRVSITYLDVYGRKREWIYTRSEIRFDQNYASLYFSVGSGVVIGDNVHFLIWGNLYFPIEEPAFCTAPQCRTFNQQQCNQAQRPEAFGGHQMVNGILSFKTTTRGKPVLSVRTFSPKLIPLGTEGRLIHFQNINRTYIYLRSTGWHALPLTGRIIFTVPLNIEWIQQTAVSRPGRSPCGASSRCPQQCVTGVYTDLFPMGPNYEYSMTAFLDSETDRVNPTLAFINTGSIIYRKTLTQSNQKAGYTTTTCFIFKLRIWCLSIVELSPSTITEFEPVPFLYQLDVGCRMSPSGQIMPLSYGERSLSIGPYKPARKECYLEQVGDQYYLIISIPNSIQAYTIRDLDPEKIPHTGLYINDICPVLLNVYTTMSATARMMTAIMVGQWQFRPVNRPGGTRVNLPNKLANATRNEMYSPEDPGHSYYVDRLIDQYNYQTLPEGALVEICLKLNRGNNLTIIQDIQCRVYKYSRVKSNWSIGPTSSPTGITMRDMITQLNKFSTAFSPPLQCNHSFPCPCPCNCSSTIGTTKEPLTRLQHNNSTHTRTAGLNTSHNRLLSTTIKSAHVTNSSKRRDQDSATHSHTSPETPASQTEKHHTATHPHTPPTKDQTGATGHPAANETSHHPTPRTTTNPDIHHTTPPPGNPQPGNTAPHPEAATKAPTTTPQPRTNHTADAAPQADPPQKLNPTEQPIKTPTPTTTPTAPTTYPNRTTEPNPENNDTPIHPHNDPTRDTTTSPANHNTLDPHGDPEAEGTTTSETTSRSKPAGDTKETEHETLDSPKDPHVDTTTSATTTDEGVDKTSTNTTQHAHPTPKQRSQTTDNTTRPDSPQQDTSTQTDTPRDQPNSPGADPGQPPPTDPPEEQREGGQPDNKKQEETSSNNTKPEDAKITPDKAESRETSKPNSSIPTKEEERPNSQPLLRGGESQTLRLSNIEDLHIDDTSPSHTSHSEVQPTPKPPSEENPSFELIDVSHNNPKPDESLTKPCYQIDRHCTDNYLSTIGPLIDCYNKTEEVLCRLQTQTIDYMEKNCPGGYLNTSMASILGVAYSEYGDCRRGESLKPGHNYICMINGTSYLADREFICRKPSYKVMTNLTTTKLFHSSQSPFDTVGHLIGKYPFSYQEFIEWAGHYYPRPTEYMCGLGEFCGYTFVFFLSPDFNAYFEPTIYYKSIEKLNRSPIQIYNLCGRVFEVADQLTEPYHNVIVTPLKNKVLILRSLSYNDFADLGGNKTSCDTILQRRAYFSVETSVAKEARKNKGKLEAVTKSPNEKITRMKRATNPSYGATPSYDTFGDLILSALESLWYKRR

SEQ ID NO: 372 - protein, 546 aa, Tailam jeilongvirus
MKLSVVYTTLLVSTFYSDLARSQLALSELTKIGVIPGRSYDLKISTQASYQYMVVKLIPNLTGLNNCTNGTIEAYKKMLNRLLSPIDAALRKMKDAVNDKPPESVGNVKFWGAVIGGVALGVATSAQITAGVALHNSIQNANAILALKDSIRQSNKAIQELQTAMSTTVVVLNALQDQINNQLVPAINSLGCQVVANTLGLKLNQYFSEISLVFGPNLRDPTSETLSIQALSRAFNGDFDSMLSKLKYDDSDFLDLLESDSIRGRIIDVSLSDYLITIQIEYPALLSIKDAVIQTFNLISYNTRGTEWISIFPKQLLVRGTYISNIDISQCVIAATSIICKSDTSTPISSATWSCATGNITNCARTRVVNAHVPRFALYGGVVFANCAPVVCKCQDPLYSINQEPKVTNVMVDVDACKEMYLDGLYITLGKTQISRAMYAEDVSLGGPISVDPIDLGNEINSINSAINRSEEHLNHANELLDKVNPRIVNVKTFGVMIGLLVLVVLWCVITLVWLICLTKQLARTAYAGSMGSRASTVNSLSGFVG

SEQ ID NO: 373 - protein, 1052 aa, Tailam jeilongvirus
MSQLAAHNLAMSNFYGIHQGGQSTSQKEEEQPVQGVIRYASMIVGLLSLFTIIALNVTNIIYMTESGGTMQSIKNAQGSIDGSMKDLSGTIMEDIKPKTDLINSMVSYNIPAQLSMIHQIIKNDVLKQCTPSFMFNNTICPLAENPTHSRYFEEVNLDSISECSGNEMSLELGTEPEFIEYPSFAPGSTKPGSCVRLPSFSLSSTVFAYTHTIMGHGCSELDVGDHYLAIGRIADAGHEIPQFETISSWFINDKINRRSCTVAAGVMETWMGCVIMTETFYDDLDSLDTGKITISYLDVFGRKKEWIYTRSEILYDYTYTSVYFSIGSGVVVGDTVYFLLWGSLSSPIEETAYCYAPGCSNYNQRMCNEAQRPAKFGHRQMANAILRFKTNSMGKPSISVRTLSPTVIPFGTEGRLIYSDFTKIIYLYLRSTSWYVLPLTGLLILGPPVSISWVTQEAVSRPGEYPCGASNRCPKDCITGVYTDLFPLGARYEYAVTVYLNAETYRVNPTLALIDRSKIIARKKITTESQKAGYTTTTCFVFKLRIWCMSVVELAPATMTAFEPVPFLYQLDLTCKRNNGTTAMQFSGQDGMYKSGRYKSPRNECFFEKVSNKYYFVVSTPEGIQPYEVRDLTPERVSHVIMYISDVCAPALSAFKKLIPAMRPITTLTIGNWQFRPVDISGGLRVNIYRNLTRYGDLSMSAPEDPGTDTFPGTHAPSKGHEEVGHYTLPNEKLSEVTTAAVKTKESLNLIPDTKDTRGEEENGSGLNEIITGHTTPGHIKTHPAETKVTKHTVIIPQIEEDGSGATTSTELQDETGYHTEDYNTTNTNGSLTAPNERNNYTSGDHTVSGEDITHTITVSDRTKTTQTLPTDNTFNQTPTKIQEGSPKSESTPKDYTAIESEDSHFTDPTLIRSTPEGTIVQVIGDQFHSAVTQLGESNAIGNSEPIDQGNNLIPTTDRGTMDNTSSQSHSSTTSTQGSHSAGHGSQSNMNLTALADTDSVTDQSTSTQEIDHEHENVSSILNPLSRHTRVMRDTVQEALTGAWGFIRGMIP

SEQ ID NO: 374 - protein, 604 aa, Canine morbillivirus
MLPYQDKVGAFYKDNARANSTKLSLVTEGHGGRRPPYLLFVLLILLVGILALLAITGVRFHQVSTSNMEFSRLLKEDMEKSEAVHHQVIDVLTPLFKIIGDEIGLRLPQKLNEIKQFILQKTNFFNPNREFDFRDLHWCINPPSTVKVNFTNYCESIGIRKAIASAANPILLSALSGGRGDIFPPHRCSGATTSVGKVFPLSVSLSMSLISRTSEVINMLTAISDGVYGKTYLLVPDDIEREFDTREIRVFEIGFIKRWLNDMPLLQTTNYMVLPKNSKAKVCTIAVGELTLASLCVEESTVLLYHDSSGSQDGILVVTLGIFWATPMDHIEEVIPVAHPSMKKIHITNHRGFIKDSIATWMVPALASEKQEEQKGCLESACQRKTYPMCNQASWEPFGGRQLPSYGRLTLPLDASVDLQLNISFTYGPVILNGDGMDYYESPLLNSGWLTIPPKDGTISGLINKAGRGDQFTVLPHVLTFAPRESSGNCYLPIQTSQIRDRDVLIESNIVVLPTQSIRYVIATYDISRSDHAIVYYVYDPIRTISYTHPFRLTTKGRPDFLRIECFVWDDNLWCHQFYRFEADIANSTTSVENLVRIRFSCNR

SEQ ID NO: 375 - protein, 662 aa, Canine morbillivirus; identical to SEQ ID NO: 116

SEQ ID NO: 376 - protein, 604 aa, Cetacean morbillivirus
MSSPRDKVDAFYKDIPRPRNNRVLLDNERVIIERPLILVGVLAVMFLSLVGLLAIAGVRLQKATTNSIEVNRKLSTNLETTVSIEHHVKDVLTPLFKIIGDEVGLRMPQKLTEIMQFISNKIKFLNPDREYDFNDLHWCVNPPDQVKIDYAQYCNHIAAEELIVTKFKELMNHSLDMSKGRIFPPKNCSGSVITRGQTIKPGLTLVNIYTTRNFEVSFMVTVISGGMYGKTYFLKPPEPDDPFEFQAFRIFEVGLVRDVGSREPVLQMTNFMVIDEDEGLNFCLLSVGELRLAAVCVRGRPVVTKDIGGYKDEPFKVVTLGIIGGGLSNQKTEIYPTIDSSIEKLYITSHRGIIRNSKARWSVPAIRSDDKDKMEKCTQALCKSRPPPSCNSSDWEPLTSNRIPAYAYIALEIKEDSGLELDITSNYGPLIIHGAGMDIYEGPSSNQDWLAIPPLSQSVLGVINKVDFTAGFDIKPHTLTTAVDYESGKCYVPVELSGAKDQDLKLESNLVVLPTKDFGYVTATYDTSRSEHAIVYYVYDTARSSSYFFPFRIKARGEPIYLRIECFPWSRQLWCHHYCMINSTVSNEIVVVDNLVSINMSCSR

SEQ ID NO: 377 - protein, 552 aa, Cetacean morbillivirus
MASNDNSVIYHSFLTVILLVVVTEGQIHWGNLSKIGIVGTGSASYKVMTRPSHQYLVIKLMPNVTMIDNCTRTEVAEYRKLLKTVLEPVRNALTVITKNIKPIQSLTTSRRSKRFAGVVLAGVALGVATAAQITAGIALHQSIMNSQSIDNLRTSLEKSNQAIEEIRQASQETVLAVQGVQDFINNELIPSMHQLSCEMLGQKLGLKLLRYYTEILSIFGPSLRDPVSAEISIQALTYALGGDINKVLEKLGYSGADLLAILESRGIKAKITHVDLEGYFIVLSIAYPTLSEVKGVIVHRLEAVSYNLGSQEWYTTLPRYVATNGYLISNFDESSCAFMSEVTICSQNALYPMSPLLQQCLRGSTASCARSLVSGTIGNRFILSKGNLIANCASVLCKCYSTGTIISQDPDKLLTFVAADKCPLVEVDGITIQVGSREYPDSVYVSRIDLGPPISLEKLDVGTNLGNALTKLNNAKELLDSSNQILENVRRGSFGGAMYIGILVCAGALVILCVLVYCCKRYCCSRVQIVPKSTPGLKPDLTGTTKSYVRSL

SEQ ID NO: 378 - protein, 514 aa, Feline morbillivirus
MNRIRVIIISSLLLSDITIAQIGWDNLTSIGVISTKQYNYKITTLNTNQLMVIKMVPNISSIINCTKLELIKYRELISGIIRPINESLELMNSYINMRVGSERFIGAVIAGVALGVATAAQITSGIALHNSIMNKKQIQELRKALSTTNKAIDEIRIAGERTLMAVQRVQDYINNIIVPMQDKLQCDILSSQLAVALLRYYTNIVTVFEPSIRHPITSTISLQPLSQPFNGNLQALLDGIAYTGRDLRDLLESKSITGQIIHADMTDLFLVLRINYPSITEMQGVTIYELNSITYHIGPEEWYTIMPDFIAVQGFLISNFDERKCSITKSSVLCQQNSIYPMSTEMQRCIKGEIRFCPRSKAIGTLVNRFILTKGNLMANCLGIICRCYTSGQVITQDPSKLITIISQEECKEVGVDGIRIMVGPRKLPDITFNARLEIGVPISLTKLDVGNDLAIASAKLNNSKPWLEQSERIPDSMSKSNSIKSRITRLTLAIMIIFIIIITIIWIIYKNCR

SEQ ID NO: 379 - protein, 595 aa, Feline morbillivirus
MESNNIKYYKDSNRYLGKILDEHKIVNSQLYSLSIKVITIIAIIVSLIATIMTIINATSGRTTLNSNTDILLNQRGEIHSIHEMIFDRVYPLITAMSTELGLHIPTLLDELTKAIDQKIKIMNPPVNTVTSDLSWCIKPPNGIIIDPKGYCESMELSKTYKLLLDQLDVSRKKSLTINRKNINQCQLVDDSKIIFATVNIQSTPRFLNFGHTVSNQRITFGQGTYSSTYILTIQEDGITDVQYRVFEIGYISDQFGVFPSLIVSRVLPIRMVLGMESCTLTSDRQGGYFLCMNTLTRSIYDYVNIRDLKSLYITLPHYGKVNYTYFNFGKIRSPHEIDKLWLTSDRGQIISGYFAAFVTITIRNYNNYPYKCLNNPCFDNSENYCRGWYKNITGTDDVPILAYLLVEMYDEEGPLITLVAIPPYNYTAPSHNSLYYDDKINKLIMTTSHIGYIQINEVHEVIVGDNLKAILLNRLSDEHPNLTACRLNQGIKEQYKSDGMIISNSALIDIQERMYITVKAIPPVGNYNFTIELHSRSNTSYILLPKQFNAKYDKLHLECFNWDKSWWCALIPQFSLSWNESLSVDTAIFNLINCK

SEQ ID NO: 380 - protein, 550 aa, Measles morbillivirus; identical to SEQ ID NO: 110

SEQ ID NO: 381 - protein, 617 aa, Measles morbillivirus
MSPQRDRINAFYKDNPHPKGSRIVINREHLMIDRPYVLLAVLFVMFLSLIGLLAIAGIRLHRAAIYTAEIHKSLSTNLDVTNSIEHQVKDVLTPLFKIIGDEVGLRTPQRFTDLVKFISDKIKFLNPDREYDFRDLTWCINPPERIKLDYDQYCADVAAEELMNALVNSTLLETRTTNQFLAVSKGNCSGPTTIRGQFSNMSLSLLDLYLGRGYNVSSIVTMTSQGMYGGTYLVEKPNLSSKRSELSQLSMYRVFEVGVIRNPGLGAPVFHMTNYLEQPVSNDLSNCMVALGELKLAALCHGEDSITIPYQGSGKGVSFQLVKLGVWKSPTDMQSWVPLSTDDPVIDRLYLSSHRGVIADNQAKWAVPTTRTDDKLRMETCFQQACKGKIQALCENPEWAPLKDNRIPSYGVLSVDLSLTVELKIKIASGFGPLITHGSGMDLYKSNHNNVYWLTIPPMKNLALGVINTLEWIPRFKVSPYLFNVPIKEAGEDCHAPTYLPAEVDGDVKLSSNLVILPGQDLQYVLATYDTSRVEHAVVYYVYSPSRSFSYFYPFRLPIKGVPIELQVECFTWDQKLWCRHFCVLADSESGGHITHSGMEGMGVSCTVTREDGTNRR

SEQ ID NO: 382 - protein, 537 aa, Phocine morbillivirus; identical to SEQ ID NO: 124

SEQ ID NO: 383 - protein, 607 aa, Phocine morbillivirus
MFSHQDKVGAFYKNNARANSSKLSLVTDEVEERRSPWFLSILLILLVGILILLTITGIRFHQVVKSNLEFNKLLIEDMEKTEAVHHQVKDVLTPLFKIIGDEVGLRLPQKLNEIKQFIVQKTNFFNPNREFDFRELHWCINPPSKVKVNFTQYCEITEFKEATRSVANSILLLTLYRGRDDIFPPYKCRGATTSMGNVFPLAVSLSMSLISKPSEVINMLTAISEGIYGKTYLLVTDDTEENFETPEIRVFEIGFINRWLGDMPLFQTTNYRIISNNSNTKICTIAVGELALASLCTKESTILPNLGDEESQNSVLVVILGLFGATHMDQLEEVIPVAHPSIEKIHITNHRGFIKDSVATWMVPALALSEQGEQINCLSSACKRRTYPMCNQTSWEPFGDKRLPSYGRLTLSLDVSTDLSINVSVAQGPIIFNGDGMDYYEGTLLNSGWLTIPPKNGTILGLINQASKGDQFIVTPHILTFAPRESSTDCHLPIQTYQIQDDDVLLESNLVVLPTQSFEYVVATYDVSRSDHAIVYYVYDPARTVSYTYPFRLRTKGRPDILRIECFVWDGHLWCHQFYRFQLDATNSTSVVENLIRIRFSCDRLDP

SEQ ID NO: 384 - protein, 546 aa, Rinderpest morbillivirus; identical to SEQ ID NO: 113

SEQ ID NO: 385 - protein, 609 aa, Rinderpest morbillivirus
MSPPRDRVDAYYKDNFQFKNTRVVLNKEQLLIERPCMLLTVLFVMFLSLVGLLAIAGIRLHRAAVNTAKINNDLTTSIDITKSIEYQVKDVLTPLFKIIGDEVGLRTPQRFTDLTKFISDKIKFLNPDKEYDFRDINWCINPPERIKIDYDQYCAHTAAEDLITMLVNSSLTGTTVPRTSLVNLGRNCTGPTTTKGQFSNISLTLSGIYSGRGYNISSMITITGKGMYGSTYLVGKYNQRARRPSKVWHQDYRVFEVGIIRELGVGTPGFHMTNYLELPRQPELETCMLALGESKLAALCLADSPVALHYGRVGDDNKIRFVKLGVWASPADRDTLATLSAIDPTLDGLYITTHRGIIAAGTAIWAVPVTRTDDQVKMGKCRLEACRDRPPPFCNSTDWEPLEAGRIPAYGVLTIKLGLADEPKVDIISEFGPLITHDSGMDLYTSFDGTKYWLTTPPLQNSALGTVNTLVLEPSLKISPNILTLPIRSGGGDCYIPTYLSDRADDDVKLSSNLVILPSRDLQYVSATYDISRVEHAIVYHIYSTGRLSSYYYPFKLPIKGDPVSLQIECFPWDRKLWCHHFCSVVDSGTGEQVTHIGVVGIKITCNGK

SEQ ID NO: 386 - protein, 546 aa, Small ruminant morbillivirus
MTRVAILTSLFLLPNVVACQIHWGNLSKIGIVGTGSASYKVMTRPSHQTLVIKLMPNITAIDNCTKSEIAEYKRLLITVLKPVEDALSVITKNVRPIQTLTPGRRTRRFAGAVLAGVALGVATAAQITAGVALHQSLMNSQAIESLKTSLEKSNQAIEEIRLANKETILAVQGVQDYINNELVPSVHRMSCELVGHKLGLKLLRYYTEILSIFGPSLRDPIAAEISIQALSYALGGDINKILDKLGYSGGDFLAILESKGIKARVTYVDTRDYFIMLSIAYPTLSEIKGVIVHKIEAITYNIGAQEWYTTIPKYVATQGYLISNFDETSCVFTPEGTVCSQNALYPMSPLLQECFRGSTKSCARTLVSGTISNRFILSKGNLIANCASVLCKCYTTETVISQDPDKLLTVVASDKCPVVEVDGVTIQVGSREYPDSVYLHKIDLGPAISLEKLDVGTNLGNAVTRLENAKELLDASDQILKTVKGAPFGGNMYIALAACIGVSLGLVTLICCCKGRCKNKEIPISKINPGLKPDLTGTSKSYVRSL

SEQ ID NO: 387 - protein, 609 aa, Small ruminant morbillivirus
MSAQRERVNAFYKDNPHNKNHRVILDRERLVIERPYILLGVLLVMFLSLIGLLAIAGIRLHRATVGTSEIQSRLNTNIELTESIDHQTKDVLTPLFKIIGDEVGIRIPQKFSDLVKFISDKIKFLNPDREYDFRDLRWCMNPPERVKINFDQFCEYKAAAKSIEHIFESPLNKSKKLQSLTLGPGSGCLGRTVTRAHFSELTLTLMDLDLEKKHNVSSVFTVVEEGLFGRTYTVWRFDARDPSTDLGIGHFLRVFEIGLVRDLGLGPPVFQMTNYLTVNMSDDYRRCLLAVGELKLTALCTSSETVTLNEGGVPKRESLAVVILNLAGPTLGGELYSVLPISDLMVEKLYLSSHRGVIKDDEANWVVPSTDVRDLQNKGECLVEACKTRPPSFCNGTGSGPWSEGRIPAYGVIRVSLDLASDPGVVITSAFGPLIPHLSGMDLYNNPFSRAVWLAVPPYEQSFLGMINTIGFPDRAEVMPHILTTEIRGPRGRCHVPIELSHRVDDDIKIGSNMVILPTMDLRYITATYDVSRSEHAIVYYIYDTGRSSSYFYPVRLNFKGNPLSLRIECFPWRHKVWCYHDCLIYNTITDEEVHARGLTGIEVTCNPV

SEQ ID NO: 388 - protein, 552 aa, Mossman narmovirus
MSNYFPARVIIIVSLITAVSCQISFQNLSTIGVFKFKEYDYRVSGDYNEQFLAIKMVPNVTGVENCTASLIDEYRHVIYNLLQPINTTLTASTSNVDPYAGNKKFFGAVIAGVALGVATAAQVTAGVALYEARQNAAAIAEIKESLHYTHKAIESLQISQKQTVVAIQGIQDQINTNIIPQINALTCEIANQRLRLMLLQYYTEMLSSFGPIIQDPLSGHITVQALSQAAGGNITGLMRELGYSSKDLRYILSVNGISANIIDADPEIGSIILRIRYPSMIKIPDVAVMELSYLAYHAAGGDWLTVGPRFILKRGYSLSNLDITSCTIGEDFLLCSKDVSSPMSLATQSCLRGDTQMCSRTAVQDREAPRFLLLQGNLIVNCMSVNCKCEDPEETITQDPAYPLMVLGSDTCKIHYIDGIRIKLGKVQLPPITVLNTLSLGPIVVLNPIDVSNQLSLVETTVKESEDHLKNAIGALRSQSRVGGVGIVAIVGLIIATVSLVVLVISGCCLVKYFSRTATLESSLTTIEHGPTLAPKSGPIIPTYINPVYRHD

SEQ ID NO: 389 - protein, 632 aa, Mossman narmovirus
MVDPPAVSYYTGTGRNDRVKVVTTQSTNPYWAHNPNQGLRRLIDMVVNVIMVTGVIFALINIILGIVIISQSAGSRQDTSKSLDIIQHVDSSVAITKQIVMENLEPKIRSILDSVSFQIPKLLSSLLGPGKTDPPIALPTKASTPVIPTEYPSLNTTTCLRIEESVTQNAAALFNISFDLKTVMYELVTRTGGCVTLPSYSELYTRVRTFSTAIRNPKTCQRAGQETDLNLIPAFIGTDTGILINSCVRQPVIATGDGIYALTYLTMRGTCQDHRHAVRHFEIGLVRRDAWWDPVLTPIHHFTEPGTPVFDGCSLTVQNQTALALCTLTTDGPETDIHNGASLGLALVHFNIRGEFSKHKVDPRNIDTQNQGLHLVTTAGKSAVKKGILYSFGYMVTRSPEPGDSKCVTEECNQNNQEKCNAYSKTTLDPDKPRSMIIFQIDVGAEYFTVDKVVVVPRTQYYQLTSGDLFYTGEENDLLYQLHNKGWYNKPIRGRVTFDGQVTLHEHSRTYDSLSNQRACNPRLGCPSTCELTSMASYFPLDKDFKAAVGVIALRNGMTPIITYSTDDWRNHWKYIKNADLEFSESSLSCYSPNPPLDDYVLCTAVITAKVMSNTNPQLLATSWYQYDKCHT

SEQ ID NO: 390 - protein, 557 aa, Myodes narmovirus
MYKVVLLFLLLCNAPVVAQLATSQLGSIGVYSVKELEYRVTGEYVTQYLVVQIIPELPTNDNCTRPVVRDYKDSIYNILAPVNETLDIVSTYVGPYSGTKRFVAEIIAGAALGVATAAQITAGIALYEARQNAAQIEAIKSSLKHTNAAIQSLQTAQKQTVVAIRSIQDQINTKIIPQLNTLSCDLIGQQLRLSLLEYYTEILTVFGPIIQSPLNGEVTIQAIARSAGGNLTGLLNELGYNSQDLKNILEINAIRGSVVDVDPILGTLIFNIRYPTFIKIPDATIIQLAYVSFHSGSYDWMTQGPSHIMVRGYTIADVDTTQCTVGSNYLMCPRDTTKPFSSSMNQCLRGNLTYCPRTIVTDRDAPRFLVVKGNLVANCITINCKCEDPEYTIMQAKDEPLVILDNGTCKAHFVDGIRIALGPRKLPTIYLSKEIKLGPVITVNPVEVSHQLSVIEDNIENSEAHLKIAIEKLNNVPQLNGSYVSPVVAIVISVVSLCVTLVVAFLLYRYINHVQNLRFNLDTIEKGPTLAPKGHHYPGSYLNQGFSSYPSAPSLAM

SEQ ID NO: 391 - protein, 625 aa, Myodes narmovirus
MDQARYYTGTGRNNELASASTKIRTIPYIHNNTVNRGFNFLLDVVAVIGVVLGVISIGLSTTSIIYHTRTQNVTTKADPYIKPIYDDVKQISQYYTEYIDPRLRNILDAVTFQIPKTLASITSTLGASELQEQQEAFNALLDGITTTLRSAVNSLNQLTSIILEQFDETKLIVREINNEILNTNKSFIPIEHPFTQYPRVHTTSMSSLPPLRCTRAVPTANPKRVPIFVSNVGGMLENSCTKEPVISMANGVFASTYLYLRDSCTDYQSSIRFFEMGIVKRLSDNDPYLSVIHTWDQASPFVLQPCSLAVAYDNGYALCAESVTGVDNDLVTGNTIRLVLFTFTLFGSLERKVIYYENFKRPREFVYIIPGAGQGVIIDNVMYSIGYYVSENTPQGNLKCPTTGCPNLQYSTCDQFSRTQVSNHRHKFLTLIQVNLTQYPLPVHNLLVIPRSYYSIISHGNLYYRNSNDSVLFQLYNVGWYHKPLVGSINLTTPLSLEFLNKDYDLLSSVTNCVPGFGCPSSCEISAYGAYTPLDYNFNDAVSLIPRTSGAYPSVSYGSGNTRIDFRIILNQQLALRESSLVCYLPTIQNTGHPYCVGLMTFEVTGQTAPQLYSVGWKQTYQCSK

SEQ ID NO: 392 - protein, 566 aa, Nariva narmovirus
MAEQEKTPLRYKILLIIIVINHYNITNVFGQIHLANLSSIGVFVTKTLDYRTTSDPTEQLLVINMLPNISNIQDCAQGVVNEYKHLISSLLTPINDTLDLITSNINPYSGRNKLFGEIIAGAALTVATSAQITAGVALYEARQNAKDIAAIKESLGYAYKAIDKLTTATREITVVINELQDQINNRLIPRINDLACEVWATRLQAMLLQYYAEIFSVIGPNLQDPLSGKISIQALARAAGGNIKLMVDELNYSGQDLSRLVKVGAIKGQIIDADPSLGVVIIKMRYPNIIKIPNVAISELSYVSYSSDGQDWITTGPNYIVTRGYSIANIQTSSCSVGDDFVLCDRDMTYPMSQVTQDCLRGNIALCSRMVVRDREAPRYLILQGNMVANCMSITCRCEEPESEIYQSPDQPLTLLTRDTCDTHVVDGIRIRLGVRKLPTISVINNITLGPIITTDPIDVSNQLNAVVSTIDQSAELLHQAQRVLSERARGARDHILATAAIVICVVLAVLILVLLIGLVYLYRTQNEILVKTTMLEQVPTFAPKSFPMESQIYSGKTNKGYDPAE

SEQ ID NO: 393 - protein, 657 aa, Nariva narmovirus
MAPINYPASYYTNNAERPVVITTKSTESKGQRPLPLGNARFWEYFGHVCGTLTFCMSLIGIIVGIIALANYSSDKDWKGRIGGDIQVTRMATEKTVKLILEDTTPKLRNILDSVLFQLPKMLASIASKINTQTPPPPTTSGHSTALATQCSSNCENRPEIGYDYLRQVEQSLQRITNISIQLLEASEIHSMAGAYPNALYKIRTQDSWSVTAKECPLQAFQPNLNLIPAMIGTATGALIRNCVRQPVIVVDDGVYMLTYLAMRGSCQDHQKSVRHFEMGVITSDPFGDPVPTPLRHWTKRALPAYDGCALAVKGHAGFALCTETSVGPLRDRTAKRKPNIVLFKASLVGELSERVIPPQSWLSGFSFFSVYTVAGKGYAYHSKFHAFGNVVRVGQSEYQAKCRGTGCPTANQDDCNTAQRVSQEDNTYLHQAILSVDIDSVIDPEDVVYVIERDQYYQASAGDLYRVPETGEILYNLHNGGWSNEVQVGRIQPSDRFYMREIQLTSTRVPAPNGCNRVKGCPGGCVAVISPAFTPMHPEFNVGVGIFPMNQPHNPSIMHVQQQTELFWKPIVGGNITLHESSIACYSTVPPNPSYDLCIGVMTLLLHQGQLPQFQALSWYQPTMCNGNAPQNRRALIPVIVEDSKAMSVSSDAPRTP

SEQ ID NO: 394 - protein, 553 aa, Tupaia narmovirus
MASLLKTICYIYLITYAKLEPTPKSQLDLDSLASIGVVDAGKYNYKLMTTGSEKLMVIKLVPNITYATNCNLTAHTAYTKMIERLLTPINQSLYEMRSVITERDGGTIFWGAIIAGAALGVATAAAITAGVALHRAEQNARNIAALKDALRNSNEAIQHLKDAQGHTVLAIQGLQEQINNNIIPKLKESHCLGVNNQLGLLLNQYYSEILTVFGPNLQNPVSASLTIQAIAKAFNGDFNSLMTNLNYDPTDLLDILESNSINGRIIDVNLNEKYIALSIEIPNFITLTDAKIQTFNRITYGYGSNEWLTLIPDNILEYGNLISNVDLTSCVKTKSSYICNQDTSYPISSELTRCLRGDTSSCPRTPVVNSRAPTFALSGGHIYANCAKAACRCEKPPMAIVQPATSTLTFLTEKECQEVVIDQINIQLAPNRLNKTIITDGIDLGPEVIINPIDVSAELGNIELEMDKTQKALDRSNKILDSMITEVTPDKLLIAMIVVFGILLLWLFGVSYYAFKIWSKLHFLDSYVYSLRNPSHHRSNGHQNHSFSTDISG

SEQ ID NO: 395 - protein, 665 aa, Tupaia narmovirus
MDYHSHTTQTGSNETLYQDPLQSQSGSRDTLDGPPSTLQHYSNPPPYSEEDQGIDGPQRSQPLSTPHQYDRYYGVNIQHTRVYNHLGTIYKGLKLAFQILGWVSVIITMIITVTTLKKMSDGNSQDSAMLKSLDENFDAIQEVANLLDNEVRPKLGVTMTQTTFQLPKELSEIKRYLLRLERNCPVCGTEATPQGSKGNASGDTAFCPPCLTRQCSEDSTHDQGPGVEGTSRNHKGKINFPHILQSDDCGRSDNLIVYSINLVPGLSFIQLPSGTKHCIIDVSYTFSDTLAGYLIVGGVDGCQLHNKAIIYLSLGYYKTKMIYPPDYIAIATYTYDLVPNLRDCSIAVNQTSLAAICTSKKTKENQDFSTSGVHPFYIFTLNTDGIFTVTVIEQSQLKLDYQYAALYPATGPGIFIGDHLVFLMWGGLMTKAEGDAYCQASGCNDAHRTSCNIAQMPSAYGHRQLVNGLLMLPIKELGSHLIQPSLETISPKINWAGGHGRLYYNWEINTTYIYIEGKTWRSRPNLGIISWSKPLSIRWIDHSVARRPGARPCDSANDCPEDCLVGGYYDMFPMSSDYKTAITIIPTHHQWPSSPALKLFNTNREVRVVMILRPPNNVKKTTISCIRIMQTNWCLGFIIFKEGNNAWGQIYSYIYQVESTCPNTK

SEQ ID NO: 396 - protein, 572 aa, Bovine respirovirus 3
MEYWKHTNSTKDTNNELGTTRDRHSSKATNIIMYIFWTTTSTILSVIFIMILINLIQENNHNKLMLQEIRKEFAAIDTKIQKTSDDIGTSIQSGINTRLLTIQSHVQNYIPLSLTQQMSDLRKFINDLTTKREHQEVPIQRMTHDSGIEPLNPDKFWRCTSGNPSLTSSPKIRLIPGPGLLATSTTVNGCIRLPSLAINNLIYAYTSNLITQGCQDIGKSYQVLQIGIITINSDLVPDLNPRVTHTFNIDDNRKSCSLALLNTDVYQLCSTPKVDERSDYASTGIEDIVLDIVTSNGLIITTRFTNNNITFDKPYAALYPSVGPGIYYKDKVIFLGYGGLEHEENGDVICNTTGCPGKTQRDCNQASYSPWFSNRRMVNSIIVVDKGIDTTFSLRVWTIPMRQNYWGSEGRLLLLGDRIYIYTRSTSWHSKLQLGVIDISDFNNIRINWTWHNVLSRPGNDECPWGHSCPDGCITGVYTDAYPLNPSGSIVSSVILDSQKSRENPIITYSTATNRVNELAIYNRTLPAAYTTTNCITHYDKGYCFHIVEINHRSLNTFQPMLFKTEVPKNCS

SEQ ID NO: 397 - protein, 540 aa, Bovine respirovirus 3; identical to SEQ ID NO: 126

SEQ ID NO: 398 - protein, 541 aa, Caprine respirovirus 3
MIKKIICIFSMPILLSFCQVDIIKLQRVGILVSKPKSIKISQNFETRYLVLNLIPNIENAQSCGDQQIKQYKKLLDRLIIPLYDGLRLQQDIIVVDNNLKNNTNHRAKRFFGEIIGTIALGVATSAQITAAVALVEAKQARSDIERVKNAVRDTNKAVQSIQGSVGNLIVAVKSVQDYVNNEIVPSIKRLGCEAAGLQLGIALTQHYSELTNIFGDNIGTLKEKGIKLQGIASLYHTNITEIFTTSTVDQYDIYDLLFTESIKMRVIDVDLNDYSITLQVRLPLLTKISDAQIYNVDSVSYNIGGTEWYIPLPRNIMTKGAFLGGANLQDCIESFSDYICPSDPGFILNRDIENCLSGNITQCPKTLVISDIVPRYAFVDGGVIANCLSTTCTCNGIDNRINQAPDQGIKIITYKDCQTIGINGMLFKTNQEGTLAAYTPVDITLNNSVNLDPIDLSIELNRARSDLAESKEWIKRSEAKLDSVGSWYQSSTTEIIQIVMIIVLFIINIIVLIVLIKYSRSQNQSMNNHMNEPYILTNKVQ

SEQ ID NO: 399 - protein, 574 aa, Caprine respirovirus 3
MEYWGHTNNPDKINRKVGVDQVRDRSKTLKIITFIISMMTSIMSTVALILILIMFIQNNNNNRIILQELRDETDAIEARIQKASNDIGVSIQSGINTRLLTIQNHVQNYIPLALTQQVSSLRESINDVITKREETQSKMPIQRMTHDDGIEPLIPDNFWKCPSGIPTISASPKIRLIPGPGLLATSTTINGCIRLPSLVINNLIYAYTSNLITQGCQDIGKSYQVLQIGIITINSDLVPDLNPRITHTFDIDDNRKSCSLALRNADVYQLCSTPKVDERSDYSSIGIEDIVLDIVTSEGTVSTTRFTNNNITFDKPYAALYPSVGPGIYYDNKIIFLGYGGLEHEENGDVICNITGCPGKTQHDCNQASYSPWFSNRRMVNAIILVNKGLNKVPSLQVWTIPMRQNYWGSEGRLLLLGNKIYIYTRSTSWHSKLQLGTLDISNYNDIRIRWTHHDVLSRPGSEECPWGNTCPRGCITGVYNDAYPLNPSGSVVSSVILDSRTSRENPIITYSTDTSRVNELAIRNNTLSAAYTTTNCVTHYGKGYCFHIIEINHKSLNTLQPMLFKTEIPKSCN

SEQ ID NO: 400 - protein, 555 aa, Human respirovirus 1; identical to SEQ ID NO: 142

SEQ ID NO: 401 - protein, 575 aa, Human respirovirus 1
MAEKGKTNSSYWSTTRNDNSTVNTYIDTPAGKTHIWLLIATTMHTILSFIIMILCIDLIIKQDTCMKTNIMTVSSMNESAKTIKETITELIRQEVISRTINIQSSVQSGIPILLNKQSRDLTQLIEKSCNRQELAQICENTIAIHHADGISPLDPHDFWRCPVGEPLLSNNPNISLLPGPSLLSGSTTISGCVRLPSLSIGDAIYAYSSNLITQGCADIGKSYQVLQLGYISLNSDMYPDLKPVISHTYDINDNRKSCSVIAAGTRGYQLCSLPTVNETTDYSSEGIEDLVFDILDLKGKTKSHRYKNEDITFDHPFSAMYPSVGSGIKIENTLIFLGYGGLTTPLQGDTKCVTNRCANVNQSVCNDALKITWLKKRQVVNVLIRINNYLSDRPKIVVETIPITQNYLGAEGRLLKLGKKIYIYTRSSGWHSHLQIGSLDINNPMTIKWAPHEVLSRPGNQDCNWYNRCPRECISGVYTDAYPLSPDAVNVATTTLYANTSRVNPTIMYSNTSEIINMLRLKNVQLEAAYTTTSCITHFGKGYCFHIVEINQTSLNTLQPMLFKTSIPKICKITS

SEQ ID NO: 402 - protein, 572 aa, Human respirovirus 3
MEYWKHTNHGKDAGNELETSMATHGNKITNKITYILWTIILVLLSIVFIIVLINSIKSEKAHESLLQDVNNEFMEVTEKIQMASDNINDLIQSGVNTRLLTIQSHVQNYIPISLTQQMSDLRKFISEITIRNDNQEVPPQRITHDVGIKPLNPDDFWRCTSGLPSLMKTPKIRLMPGPGLLAMPTTVDGCVRTPSLVINDLIYAYTSNLITRGCQDIGKSYQVLQIGIITVNSDLVPDLNPRISHTFNINDNRKSCSLALLNTDVYQLCSTPKVDERSDYASSGIEDIVLDIVNHDGSISTTRFKNNNISFDQPYAALYPSVGPGIYYKGKIIFLGYGGLEHPINENAICNTTGCPGKTQRDCNQASHSPWFSDRRMVNSIIVVDKGLNSIPKLKVWTISMRQNYWGSEGRLLLLGNKIYIYTRSTSWHSKLQLGIIDITDYSDIRIKWTWHNVLSRPGNNECPWGHSCPDGCITGVYTDAYPLNPTGSIVSSVILDSQKSRVNPVITYSTSTERVNELAIRNKTLSAGYTTTSCITHYNKGYCFHIVEINHKSLDTFQPMLFKTEIPKSCS

SEQ ID NO: 403 - protein, 539 aa, Human respirovirus 3; identical to SEQ ID NO: 139

SEQ ID NO: 404 - protein, 565 aa, Murine respirovirus; identical to SEQ ID NO: 138

SEQ ID NO: 405 - protein, 575 aa, Murine respirovirus
MDGDRGKRDSYWSTSPSGSTTKPASGWERSSKADTWLLILSFTQWALSIATVIICIIISARQGYSMKEYSMTVEALNMSSREVKESLTSLIRQEVIARAVNIQSSVQTGIPVLLNKNSRDVIQMIDKSCSRQELTQHCESTIAVHHADGIAPLEPHSFWRCPVGEPYLSSDPEISLLPGPSLLSGSTTISGCVRLPSLSIGEAIYAYSSNLITQGCADIGKSYQVLQLGYISLNSDMFPDLNPVVSHTYDINDNRKSCSVVATGTRGYQLCSMPTVDERTDYSSDGIEDLVLDVLDLKGRTKSHRYRNSEVDLDHPFSALYPSVGNGIATEGSLIFLGYGGLTTPLQGDTKCRTQGCQQVSQDTCNEALKITWLGGKQVVSVIIQVNDYLSERPKIRVTTIPITQNYLGAEGRLLKLGDRVYIYTRSSGWHSQLQIGVLDVSHPLTINWTPHEALSRPGNKECNWYNKCPKECISGVYTDAYPLSPDAANVATVTLYANTSRVNPTIMYSNTTNIINMLRIKDVQLEAAYTTTSCITHFGKGYCFHIIEINQKSLNTLQPMLFKTSIPKLCKAES

SEQ ID NO: 406 - protein, 576 aa, Porcine respirovirus 1
MEETKVKTSEYWAKSPQTHTASHLSIQNREKTKEILTILISFITFLSFVLIVTVLIIQSLHNGTILRCRDVGLESINKSTHSISNTILDVIRQELITRIINTQSSVQVALPVLINKKIQDLSLTIEKSLKVHQNSPTCSGVAALTHVEGIKPLDPDDYWRCPSGEPYLEDELTLNLIPGPSMLVGTSTIDGCVRLPSLAIGKSLYAYSSNLITKGCQDIGKSYQVLQLGIITLNSDLHPDLNPIISHTYDINDNRKSCSVAVSETKGYQLCSMPRVNEKTDYTSDGIEDIVFDVLDLKGSSRSFKFSNNDINFDHPFSALYPSVGSGIIWENELYFLGYGALTTALQGNTKCNLVGCPGATQDNCNKFISSSWLYSKQMVNVLIQVKGYLSNKPSIKVRTIPITENYVGAEGRLVGTRERIYIYTRSTGWHTNLQIGVLNINHPITITWTDHRALSRPGRSPCAWNNRCPRNCTTGVYTDAYPISPDANYVATVTLLSNLTRTNPTIMYSSSDKVHNMLRLRDAELEAAYTTTSCIVHFDRGYCFHIIEINQKELNTLQPMLFKTAIPKACRISNL

SEQ ID NO: 407 - protein, 557 aa, Porcine respirovirus 1
MQVTTLGLAITLSIASLVTSQVPRDKLANLGIIIKDSKALKIAGSYENRYIVLSLVPTIDNVNGCGSIQIAKYKEMLERLLIPIKDALDLQESLIVIDNETTANTYHPQYRFVGAIIGTIALGVATAAQVTAGVALMEAREAKRDISMLKEAMEKTQNSIEKLQNSAGEQILALKMLQDYVNGEIKPAIEELGCETAALKLGIALTQHYTELTNAFGSNLGSIGEKSLTLQALSSLYKTNITDILTATNLRKTDIYDIIYAEQVKGRVIDVDLRRYMVTISIKIPILSEIPGVLIYEVSSISYNIDGAEWYAAVPDHILSKSAYIGGADVSDCIESGLTYICPRDPAQIIADNQQKCFLGHLDKCPVTKVIDNLVSKFAFINGGVVANCIASTCTCGEERIQVSQDRDKGVTFLTHNNCGLIGVNGVELHANKKGSDATWNVSPIGVGPAVSLRPVDISLQIVAATNFLNSSRKDLMKAKEVLNQVGNLKDLTVITIINIKIIIVLLICVIGLGILYHQLRSALEMRDKMSALNNSSYSLEPRTVQVQVMKPISFTR

SEQ ID NO: 408 - protein, 574 aa, Squirrel respirovirus
MDKGKNTKEPYWTASSDPNIPGSVSDELHLNRSLYKSALISTTQLTISLVVLVLSSIIVARQSSNIRDGPAILETVNISHKEMKEAIMNLIRQEVIARSINIQSSVQTGIPVLLNKNTRDIIQTVGKSCNRQELTQLCESTIAVHHADGITPLNPHEFWRCPAGEPYLGQDPEISLLPGPSLLSGSTTISGCVRLPSLSIGDTIYAYSSNLITQGCANIGKSYQVLQLGYISLNSDMFPDLNPVVSHTYDINDNRKSCSVIAAGNKGYQLCSMPKVDERADYASDGIEDLVLDVLDLKGRTRSHRYKNRDINFDHPFSSLYPSVGSGVALGQSLIFLGYGGLTTPLQGNTKCNLRGCRQVSQETCNEALKVTWLGGRQIVNAIISVTNYLSDRPRIEVTTIPITQNYLGAEGRLLKLGDKIYIYTRSSGWHSQLQIGVLDMGNPLTITWTTHEFLSRPGNAECNWYNTCPKECISGVYTDAYPLSPDAANVATVTLYANTSRVNPTIMYSNTTNAINMLRIQGVDLEAAYTTTSCVTHFGKGYCFHIIEINQKSLNTLQPMLFKTSIPKLCNVG

SEQ ID NO: 409 - protein, 573 aa, Squirrel respirovirus
MAAESPNPVHIITISLIMLTTLSQCQIPRDKLSNIGVIIDEGKALKIAGSHESRYIVLSLVPGVDTSNDCGTTQIVQYKNLLNRLLIPLRDALDLQESLITVTNETSVTPDLGQFRVFGAVIGTIALGVAASAQITAGVALAEVREVKRDIELIKDSISKTHKSIEFLQNSVGEQILALKTLQDFVNDEIKPAIDELGCETAALRLGIKLSQHYSELLTAFGSNLRTIGEKSLTLQALSSLYSTNITEIMTTVDTGQANIYDIIYTEQIKGTVIDVDLERYMVTLSVKIPILSEIPGVLIYRASSISYNIDGEEWYVTVPSHILSRTSFIGGANIAECVESRLAYICPRDPAQLISPEQQRCLLGDTTSCPVTRVIDSLIPKFAFLNGGVVANCIASTCTCGKSRRPVSQDRSRGVIFLTYDNCGLIGVNGIELYANSKGHDATWGDHNLTVGPAVSIKPIDISLNLAAATDFLEDSRAELEKARKILAEVGGWHNSRTVQITIIVLVILILIVMIGVIVVLYKTRRTFVNNNAQKERLENIYTLEPKTKYMYTNGAFEPPIRQGRAPPSLYS

SEQ ID NO: 410 - protein, 552 aa, Salem salemvirus
MNPLNQTLIAKVLGFLLLSSSFTVGQIGFENLTRIGVHQVKQYGYKLAHYNSHQLLLIRMIPTVNGTHNCTHQVITRYREMVREIITPIKGALDIMKKAVSPDLVGARIFGAIVAGAALGIATSAQITAGVALHRTKLNGQEISKLKEAVSLTNEAVEQLQYSQGKSILAIQGIQDFINFNVVPLLEEHTCGIAKLHLEMALMEYFQKLILVFGPNLRDPIGSTIGIQALATLFQNNMFEVSLRLGYAGDDLEDVLQSNSIRANIIEAEPDSGFIVLAIRYPTLTLVEDQVITELAHITFNDGPQEWVATIPQFVTYRGLVLANIDVSTCTFTERNVICARDQTYPMIIDLQLCMRGNIAKCGRTRVTGSTASRFLLKDGNMYANCIATMCRCMSSSSIINQEPSHLTTLIVKETCSEVMIDTIRITLGERKHPPIDYQTTITLGQPIALAPLDVGTELANAVSYLNKSKVLLEHSNEVLSSVSTAHTSLTATIVLGIVVGGLAILIVVMFLFLEAQVIKVQRAMMLCPITNHGYLPNEDLLTRGHSIPTIG

SEQ ID NO: 411 - protein, 620 aa, Salem salemvirus
MKAMHYYKNDFADPGTNDNSSDLTTNPFISNQIKSNLSPPVLAEGHLSPSPIPKFRKILLTISFVSTIVVLTVILLVLTIRILTIIEASAGDEKDIHTILSSLLNTFMNEYIPVFKNLVSIISLQIPQMLIDLKTSSTQMMQSLKTFPRDLETLSTVTQSVAVLLEKAKSTIPDINKFYKNVGKVTFNDPNIKVLTLEVPAWLPIVRQCLKQDFRQVISNSTGFALIGALPSQLFNEFEGYPSLAIVSEVYAITYLKGVMFENQENFLYQYFEIGTISPDGYNKPYFLRHTSVMLSTFKLSGKCTAAVDYRGGIFLCTPSPKIPKILQNPPDLPTLTVVSIPFDGRYTIRNISLMLTDEADIIYDLDTLQGRGVLQAMRFYALVRVISSSSPRHFPFCKNSWCPTADDKICDQSRRLGADGNYPVMYGLISIPAHSSYQGNVSLKLIDPKYYAYTRDASLFYNSMTDTYHYSFGTRGWVSRPIIGELLLGDDIVLTRYTVRSVSRATAGDCTTVSMCPQACSGGMNSIFYPLNFDKPQVTGVAIRQYERQQEGIIVVTMNDHYYYSVPIIKNGTLLISSVTDCFWLMGDLWCMSLMEKNNLPLGVRSLAHLTWNIHWSCS

SEQ ID NO: 412 - protein, 571 aa, Human orthorubulavirus 2
MEDYSNLSLKSIPKRTCRIIFRTATILGICTLIVLCSSILHEIIHLDVSSGLMDSDDSQQGIIQPIIESLKSLIALANQILYNVAIIIPLKIDSIETVIFSALKDMHTGSMSNTNCTPGNLLLHDAAYINGINKFLVLKSYNGTPKYGPLLNIPSFIPSATSPNGCTRIPSFSLIKTHWCYTHNVMLGDCLDFTTSNQYLAMGIIQQSAAAFPIFRTMKTIYLSDGINRKSCSVTAIPGGCVLYCYVATRSEKEDYATTDLAELRLAFYYYNDTFIERVISLPNTTGQWATINPAVGSGIYHLGFILFPVYGGLISGTPSYNKQSSRYFIPKHPNITCAGNSSEQAAAARSSYVIRYHSNRLIQSAVLICPLSDMHTARCNLVMFNNSQVMMGAEGRLYVIDNNLYYYQRSSSWWSASLFYRINTDFSKGIPPIIEAQWVPSYQVPRPGVMPCNATSFCPANCITGVYADVWPLNDPEPTSQNALNPNYRFAGAFLRNESNRTNPTFYTASASALLNTTGFNNTNHKAAYTSSTCFKNTGTQKIYCLIIIEMGSSLLGEFQIIPFLRELIP

SEQ ID NO: 413 - protein, 551 aa, Human orthorubulavirus 2
MHHLHPMIVCIFVMYTGIVGSDAIAGDQLLNIGVIQSKIRSLMYYTDGGASFIVVKLLPNLPPSNGTCNITSLDAYNVTLFKLLTPLIENLSKISTVTDTKTRQKRFAGVVVGLAALGVATAAQITAAVAIVKANANAAAINNLASSIQSTNKAVSDVIDASRTIATAVQAIQDRINGAIVNGITSASCRAHDALIGSILNLYLTELTTIFHNQITNPALTPLSIQALRILLGSTLPIVIESKLNTNFNTAELLSSGLLTGQIISISPMYMQMLIQINVPTFIMQPGAKVIDLIAISANHKLQEVVVQVPNRILEYANELQNYPANDCVVTPNSVFCRYNEGSPIPESQYQCLRGNLNSCTFTPIIGNFLKRFAFANGVLYANCKSLLCRCADPPHVVSQDDTQGISIIDIKRCSEMMLDTFSFRITSTFNATYVTDFSMINANIVHLSPLDLSNQINSINKSLKSAEDWIADSNFFANQARTAKTLYSLSAIALILSVITLVVVGLLIAYIIKLVSQIHQFRSLAATTMFHRENPAFFSKNNHGNIYGIS

SEQ ID NO: 414 - protein, 573 aa, Human orthorubulavirus 4
MQDSHGNTQILNQANSMVKRTWRLLFRIATLILLVSIFVLSLIIVLQSTPGNLQNDINIIRKELNELMENFETTSKSLLSVSNQITYDVSVLTPIRQEAIETNIISKIKDHCKDRVIKEGSTCTLNRSPLHDVSFLNGFNKFYFTYKDNMQIKFKSLLDYPNFIPTATTPHGCIRIPSFSLGQTHWCYTHNINLLGCADPASSNQYVSLGTLQVLKMGDPYFKVEHSHYLNDGRNRKSCSVVAVPDGCLRNCVTMTKNETENFKDLNWQHNYLHTYHIMVPLKTRIINPPGSSRDWVHIAPGVGSGLLYAKLLIFPLYGGLTEKSVIHNNQSGKYFFPNSTKLQCRNSTMEKIKGAKDSYTITYFSGRLIQSAFLVCDLRQFLSEDCEILIPSNDYMMVGAEGRLYNIENNIFYYQRGSSWWPYPSLYRIRLNLSKKYPRITEIKFTKIEIAPRPGNKDCPGNKACPKECITGVYQDILPLSYPNTAFPHLKQAYYTGFYLNNSLERRNPTFYTADNLDYHQQERLGKFNLTAGYSTTTCFKQTTTARLYCLYIIEVGDSVIGDFQITLFLAA

SEQ ID NO: 415 - protein, 544 aa, Human orthorubulavirus 4
MGVKGSSLIMIGLLISPITNLDITHLMNLGTVPTAIRSLVYYTYTKPSYLTVDLIPNLKNLDQNCNYSSLNYYNKTALSLIQPIADNINRLTKPIASSEVQSRFFGAVIGTIALGVATAAQVTAAIGLAKAQENAKLILTLKKAATETNEAVRDLANSNKIVVKMISAIQNQINTIIQPAIDQINCQIKDLQVANILNLYLTEITTVFHNQLTNPALESISIQALKSLLGSTLPEVLSKLDLNNISAASVMASGLIKGQIIAVDIPTMTLVLMVQIPSISPLRQAKIIDLTSITIHTNSQEVQAVVPARFLEIGSEILGFDGSVCQITKDTIFCPYNDAYVLPIQQKRCLQGQTRDCVFTPVAGTFPRRFLTTYGTIVANCRDLVCSCLRPPQIIYQPDENPVTIIDKDLCTTLTLDSITIEIQKSINSTFRREVVLESTQVRSLTPLDLSTDLNQYNQLLKSAEDHIQRSTDYLNSINPSIVNNNAIIILIILCILLILTVTICIIWLKYLTNEVKNVARNQRLNRDADLFHRIPSQIPVPRQ

SEQ ID NO: 416 - protein, 565 aa, Mammalian orthorubulavirus 5
MVAEDAPVRATCRVLFRTTTLIFLCTLLALSISILYESLITQKQIMSQAGSTGSNSGLGSITDLLNNILSVANQIIYNSAVALPLQLDTLESTLLTAIKSLQTSDKLEQNCSWSAALINDNRYINGINQFYFSIAEGRNLTLGPLLNMPSFIPTATTPEGCTRIPSFSLTKTHWCYTHNVILNGCQDHVSSNQFVSMGIIEPTSAGFPFFRTLKTLYLSDGVNRKSCSISTVPGGCMMYCFVSTQPERDDYFSAAPPEQRIIIMYYNDTIVERIINPPGVLDVWATLNPGTGSGVYYLGWVLFPIYGGVIKGTSLWNNQANKYFIPQMVAALCSQNQATQVQNAKSSYYSSWFGNRMIQSGILACPLRQDLTNECLVLPFSNDQVLMGAEGRLYMYGDSVYYYQRSNSWWPMTMLYKVTITFTNGQPSAISAQNVPTQQVPRPGTGDCSATNRCPGFCLTGVYADAWLLTNPSSTSTFGSEATFTGSYLNTATQRINPTMYIANNTQIISSQQFGSSGQEAAYGHTTCFRDTGSVMVYCIYIIELSSSLLGQFQIVPFIRQVTLS

SEQ ID NO: 417 - protein, 529 aa, Mammalian orthorubulavirus 5
MGTIIQFLVVSCLLAGAGSLDPAALMQIGVIPTNVRQLMYYTEASSAFIVVKLMPTIDSPISGCNITSISSYNATVTKLLQPIGENLETIRNQLIPTRRRRRFAGVVIGLAALGVATAAQVTAAVALVKANENAAAILNLKNAIQKTNAAVADVVQATQSLGTAVQAVQDHINSVVSPAITAANCKAQDAIIGSILNLYLTELTTIFHNQITNPALSPITIQALRILLGSTLPTVVEKSFNTQISAAELLSSGLLTGQIVGLDLTYMQMVIKIELPTLTVQPATQIIDLATISAFINNQEVMAQLPTRVMVTGSLIQAYPASQCTITPNTVYCRYNDAQVLSDDTMACLQGNLTRCTFSPVVGSFLTRFVLFDGIVYANCRSMLCKCMQPAAVILQPSSSPVTVIDMYKCVSLQLDNLRFTITQLANVTYNSTIKLESSQILSIDPLDISQNLAAVNKSLSDALQHLAQSDTYLSAITSATTTSVLSIIAICLGSLGLILIILLSVVVWKLLTIVVANRNRMENFVYHK

SEQ ID NO: 418 - protein, 537 aa, Mapuera orthorubulavirus
MRSSLFLVLTLLVPFAHSIDSITLEQYGTVITSVRSLAYFLETNPTYISVRLMPAIQTDSSHCSYHSIENYNLTLTKLLLPLQENLHQITDSLSSRRRKKRFAGVAVGLAALGVATAAQVTAAIAVVKAKENSAKIAQLTSAISETNRAVQDLIEGSKQLAVAVQAIQDQINNVIQPQLTNLSCQVADAQVGTILNMYLTELTTVFHPQITNSALTPITIQALRSLLGSTLPQVVTSTIKTDVPLQDLLTSGLLKGQIVYLDLQSMIMVVSVSVPTIALHSMAKVYTLKAISAHVNNAEVQMQVPSRVMELGSEIMGYDIDQCEETSRYLFCPYNGGSILSATMKMCLNGNISQCVFTPIYGSFLQRFVLVDGVIVANCRDMTCACKSPSKIITQPDSLPVTIIDSTSCSNLVLDTLELPIISINNATYRPVQYVGPNQIIFSQPLDLLSQLGKINSSLSDAIEHLAKSDEILEQIQWDSPQGYTLIALTSVLAFVVVAIVGLLISTRYLIFEIRRINTTLTQQLSSYVLSNKIIQY

SEQ ID NO: 419 - protein, 582 aa, Mapuera orthorubulavirus
MASLQSEPGSQKPHYQSDDQLVKRTWRSFFRFSVLVVTITSLALSIITLIGVNRISTAKQISNAFAAIQANILSSIPDIRPINSLLNQLVYTSSVTLPLRISSLESNVLAAIQEACTYRDSQSSCSATMSVMNDQRYIEGIQVYSGSFLDLQKHTLSPPIAFPSFIPTSTTTVGCTRIPSFSLTKTHWCYTHNYIKTGCRDATQSNQYIALGTIYTDPDGTPGFSTSRSQYLNDGVNRKSCSISAVPMGCALYCFISVKEEVDYYKGTVPPAQTLILFFFNGTVHEHRIVPSSMNSEWVMLSPGVGSGVFYNNYIIFPLYGGMTKDKAEKRGELTRFFTPKNSRSLCKMNDSVFSNAAQSAYYPPYFSSRWIRSGLLACNWNQIITTNCEILTFSNQVMMMGAEGRLILINDDLFYYQRSTSWWPRPLVYKLDIELNYPDSHIQRVDQVEVTFPTRPGWGGCVGNNFCPMICVSGVYQDVWPVTNPVNTTDSRTLWVGGTLLSNTTRENPASVVTSGGSISQTVSWFNQTVPGAYSTTTCFNDQVQGRIFCLIIFEVGGGLLGEYQIVPFLKELKYQGAVHA

SEQ ID NO: 420 - protein, 538 aa, Mumps orthorubulavirus; identical to SEQ ID NO: 140

SEQ ID NO: 421 - protein, 582 aa, Mumps orthorubulavirus
MEPSKLFIMSDNATVAPGPVVNAAGKKTFRTCFRILVLSVQAVTLILVIVTLGELIRMINDQGLSNQLSSITDKIRESAAVIASAVGVMNQVIHGVTVSLPLQIEGNQNQLLSTLATICTNRNQVSNCSTNIPLVNDLRFINGINKFIIEDYATHDFSIGNPLNMPSFIPTATSPNGCTRIPSFSLGKTHWCYTHNVINANCKDHTSSNQYVSMGILVQTASGYPMFKTLKIQYLSDGLNRKSCSIATVPDGCAMYCYVSTQLEANDYAGSSPPTQKLTLLFYNDTITERTISPSGLEGNWATLVPGVGSGIYFENKLIFPAYGGVLPNSTLGVKSAREFFRPVNPYNPCSGPPQELDQRALRSYFPRYFSSRRVQSAFLVCAWNQILVTNCELVVPSNNQTLMGAEGRVLLINNRLLYYQRSTSWWPYELLYEISFTFTNSGQSSVNMSWIPIYSFTPPGSGNCSGKNVCPTVCVSGVYLDPWPLTPYSHQSGINRNFYFTGALLNSSTTRVNPTLYVSALNNLKVLAPYGTQGLFASYTTTTCFQDTGDASVYCVYIMELASNIVGEFQILPVLARLTIT

SEQ ID NO: 422 - protein, 576 aa, Porcine orthorubulavirus
MSQLGTDQIMHLAQPAIARRTWRLCFRIFALFILIAIVITQIFMLTFDHTLLTTTQFLTSIGNLQSTITSWNPDVQAMLSISNQLIYTTSITLPLKISTTEMSILTAIRDHCHCPDCSSACPTRQMLLNDPRYMSGVNQFIGAPTESINITFGPLLGIPSFIPTSTTTQGCTRIPSFALGPSHWCYTHNFIIAGCADGGHSNQYLAMGTIQSASDGSPLLITARSYYLSDGVNRKSCSIAVVPGGCAMYCYVATRSETDYYAGNSPPQQLLTLVFSNDTIIERTIHPTGLANGWVMLVPGVGSGTLYNEYLLFPAYGGMQQILANQSGEINQFFTPYNATVRCAMAQPQFSQRAAASYYPRYFSNRWIRSAIVACPYRAIYQTQCTLIPLPNRMVMMGSEGRIFTLGDRLFYYQRSSSWWPYPLLYQVGLNFLTTPPSVSSMTQVPLEHLARPGKGGCPGNSHCPATCVTGVYADVWPLTDPRSGVGGTSLVAAGGLDSTSERMAPVNYLAIGESLLSKTYLLSKTQPAAYTTTTCFRDTDTGKIYCITIAELGKVLLGEFQIVPFLREIKIQSRY

SEQ ID NO: 423 - protein, 541 aa, Porcine orthorubulavirus
MPQQQVAHTCVMLWGIISTVSGINTEALSQYGVVVTNVRQLTYYTQAGSTYLAVRLLPSLASPDQSCALHSIINYNATLQAILSPIAENLNLISTALREQHRKKRFAGVAIGLTALGVATAAQATAAVALVRANKNAEKVEQLSQALGETNAAISDLIDATKNLGFAVQAIQNQINTAILPQIHNLSCQVIDAQLGNILSLYLTELTTVFQPQLTNPALSPLTIQALRAVLGTTLPALLSEKLKSNIPLGDLMSSGLLKGQLVGLNLQNMLMIIELYIPTLSTHSTAKVLDLVTISSHVNGREVEIQVPNRVLELGSEVLGYGGSECALTMSHILCPFNDARVLSTDMKYCLQGNITHCIFSPVVGSFLRRFALVNGVVIANCADMSCVCFDPQEIIYQNFQEPTTVIDIKKCGKVQLDTLTFTISTFANRTYGPPAYVPPDNIIQSEPLDISGNLIAVNNSLSSALNHLATSEILRNEQIWTSSLGISTIVALVIIGILIICLVVTWAALWALLKEVRGLNSAVNSQLSSYVMGDKFIRY

SEQ ID NO: 424 - protein, 561 aa, Simian orthorubulavirus; identical to SEQ ID NO: 114

SEQ ID NO: 425 - protein, 568 aa, Simian orthorubulavirus; identical to SEQ ID NO: 195

SEQ ID NO: 426 - protein, 533 aa, Achimota pararubulavirus 1
MWIMIILSLFQIIPGVTPINSKVLTQLGVITKHTRQLKFYSHSTPSYLVVKLVPTINTESTVCNFTSLSRYKDSVRELITPLAKNIDNLNSILTIPKRRKRMAGVVIGLAALGVAAAAQATAAVALIEAKKNTEQIQALSESIQNTNKAVSSIEKGLSSAAIAVQAIQNQINNVINPALTALDCGVTDAQLGNILNLYLIKTLTVFQKQITNPALQPLSIQALNIIMQETSSVLRNFTKTDEIEHTDLLTSGLITGQVVGVNLTNLQLIIAAFIPSIAPLNQAYILDFIRITVNINNSESMIQIPERIMEHGISLYQFGGDQCTFSDWSAYCPYSDATLMAPGLQNCFRGQAADCVFSTVMGSFPNRFVSVQGVFYVNCKFIRCACTQPQRLITQDDSLSLTQIDAKTCRMLTLGFVQFSINEYANVTYSFKNNVTAGQLIMTNPIDLSTEIKQMNDSVDEAARYIEKSNAALNKLMYGGRSDIVTTVLLVGFILLVVYVIFVTYILKILMKEVARLRNSNHPDLIKPYNYPM

SEQ ID NO: 427 - protein, 595 aa, Achimota pararubulavirus 1
MATNLSTITNGKFSQNSDEGSLTELPFFEHNRKVATTKRTCRFVFRSVITLCNLTILIVTVVVLFQQAGFIKRTESNQVCETLQNDMHGVVTMSKGVITTLNNLIEITSVNLPFQMKQFGQGIVTQVTQMVRQCNAVCKGPTIGPDIQNIVYPASYESMIKHPVNNSNILLSEIRQPLNFVPNTGKLNGCTRTPSFSVYNGFWCYTHAESDWNCNGSSPYMQVFRVGVVTSDYDYNVIHKTLHTKTSRLANVTYQCSTISTGYECYFLCSTPNVDEITDYKTPGIESLQIYKIDNRGTFAKFPITDQLNKELLTALYPGPGNGVLYQGRLLFPMHGGMQSSELNKVNLNNTVLSQFNDNKGCNATEIKLESEFPGTFTSPYYSNQVMLNYILICEMIENLPGNCDLQIVAPKNMSMGSESQLYSINNKLYLYQRSSSRWPYPLIYEVGTRLTNRQFRLRAINRFLIKSTTRPGSEGCNIYRVCPKVCVTGVYQAPWILHVSKAGSQSIAKVLYAVAWSKDHMSRKGPLFSICDNDTCFLTKSLASEHVHSGYSITRCYLENSERHIICVVIMELDASPWAEMRIQSVIYNITLPS

SEQ ID NO: 428 - protein, 531 aa, Achimota pararubulavirus 2
MLNSFYQIICLAVCLTTYTVISIDQHNLLKAGVIVKSIKGLNFYSRGQANYIIVKLIPNVNVTDTDCDIGSIKRYNETVYSLIKPLADNIDYLRTQFAPTKRKKRFAGVAIGLTALGVATAAQVTAAVALVKAQENARKLDALADSIQATNEAVQDLSTGLQAGAIAIQAIQSEINHVINPALERLSCEIIDTRVASILNLYLIRLTTVFHRQLVNPALTPLSIQALNHLLQGETEGLVKNESKMTDSKIDLLMSGLITGQVVGVNIKHMQLMIAVFVPTTAQLPNAYVINLLTITANINNSEVLVQLPNQILERSGIIYQFRGKDCVSSPNHMYCPYSDASILSPELQLCLQGRLEMCLFTQVVGSFPTRFASDKGIVYANCRHLQCACSEPEGIIYQDDTSAITQIDASKCSTLKLDMLTFKLSTYANKTFDASFSVGKDQMLVTNLLDLSAELKTMNASVAHANKLIDKSNLLIQSNALIGHSNTIFIVVIVILAVMVLYLIIVTYIIKVIMVEVSRLKRMNIYSIDK

SEQ ID NO: 429 - protein, 583 aa, Achimota pararubulavirus 2
MDNSMSISTISLDAQPRIWSRHESRRTWRNIFRITSLVLLGVTVIICIWLCCEVARESELELLASPLGALIMAINTIKSSVVKMTTELNQVTFTTSIILPNKVDQFGQNVVSQVAQLVKQCNAVCRGHQDTPELEQFINQKNPTWILQPNYTTKLTNLHEIDSIIPLVDYPGFSKSCTRFPSFSEGSKFWCFTYAVVKEPCSDISSSIQVVKYGAIKANHSDGNPYLVLGTKVLDDGKFRRGCSITSSLYGCYLLCSTANVSEVNDYAHTPAYPLTLELISKDGITTDLSPTYTVQLDKWSALYPGIGSGVIFKGYLMFPVYGGLPFKSPLISASWVGPGNKWPVDFSCSEDQYSTFNFSNPYSALYSPHFSNNIVVSALFVCPLNENLPYSCEVQVLPQGNLTIGAEGRLYVIDQDLYYYQRSTSWWPYLQLYKLNIRITNRVFRVRSLSLLPIKSTTRPGYGNCTYFKLCPHICVTGVYQSPWLISIRDKRPHEEKNILYFIGWSPDEQIRQNPLVSLCHETACFINRSLATNKTHAGYSESHCVQSFERNKLTCTVFYELTAKPWAEMRVQSLLFQVDFL

SEQ ID NO: 430 - protein, 595 aa, Menangle pararubulavirus
MWNSIPQLVSDHDGAKGKFTDIPLQDDTDSQQPPGSKSTCRTLFRTVLIILSLIILVLGVTSTMFSAKYSGSCATNSQLLGVSNLINQIQKSIDSLISEVNQVSITTAVTLPVKIMDFGKSVTDQVTQMIRQCNTVCKGPGQKPGSQNVRIMPSNNLSTFQNINMSARGIAYQDVPLTFVRPIKNPKSCSRFPSYSVSFGVHCFANAVTDQTCELNQNTFYRVVLSVSKGNISDPSSLETKAETRTPKGTPVRTCSIISSVYGCYLLCSKATIPESEEMKTVGFSQMFILYLAMDSKRILYDNIVSSTSAIWSGLYPGEGAGIWHMGQLFFPLWGGIPFLTPLGQKILNSTLDIPEVGSKCKSALTTSPAKTKDMLFSPYYGENVMVFGFLTCYLLSNVPTNCHADYLNSTVLGFGSKAQFYDYRGIVYMYIQSAGWYPYTQIFRITLQLKQNRLQAKSIKRIEVTSTTRPGNLECSVLWNCPYICATGLFQAPWIVNSDAITPKEVDNMVFVQAWSADFTEFRKGILSLCSQVSCPINDLLSKDNSYMRDTTTYCFPQTVPNTLPCTSFVEWGGDSGNPINILEIHYEVIFVAS

SEQ ID NO: 431 - protein, 554 aa, Menangle pararubulavirus
MIPRVLGIIVLYLTHSQILCINRNTLYQIGLIHRSVKKVNFYSQGSPSYIVVKLVPTLAAIPPNCSIKSLQRYKETVTSLVQPISDNLGYLQDKLVTGQSRRRRRFAGVAIGLAALGVAAAAQATAAVALVETRENAGKIQALSESIQNTNQAVHSLKTALGFSATAIQAIQNQVNEVINPAINKLSCEVLDSQLASMLNLYLIHLTTVFQTQLTNPALTPLSIQALTSVLQGTSGVLMNSTNSTLTQPMDLLATGLITGQIISVNMTSLQLIIATFMPSIAELPNAVLHSFFRITTSVNLTEVMIQSPEFIMEQNGVFYDFNTAHCQLGDNNVYCPYIDAARLSSTMTNCINGKLGDCVFSRVIGSFPSRFVSLNGAILANCKFMRCNCLAPEKIITPLDGEMISLIDLRVCQKLTLGTITFEISQPVNVSFQGGFVANAGQIIVTNPFDISAELGQINNSLNDAQGFLDQSNNWLKVSGWISNSGSLFIAGIVVIGLIVLCIVIIIYINVQIIREVNRLRSFIYRDYVLDHDKAPYSPELSSPHRKSLKTVS

SEQ ID NO: 432 - protein, 582 aa, Sosuga pararubulavirus
MHARNSSVSSISDSIDNVFGKRNTPVIKRTGKKLFRLGSLIFLIVIISLTVKIITELSLVKSECSNRDHVTEIINLQQKELSLMNNIITTLNTLLTTTTVDLPIKLTNFGKSIVDQVTMMVRQCNAVCRGPGDKPTQNIQLFNGRYAIINNSTAYPSRNSISELKVPRDFVPSPGTFHGCSRFPSYSNHYGLWCYSHTVSNDTCDGSNPSVQILSVGKLITGDNGQPEHKTLYTQQLSQTDRLYHCSVTMTTLGCYILCSKPRVNETQDYETIGIEPMIIGMLGLDGVYTDLGNPVGISDNSLYAMYPGPGGGVMYKDFLVFPLHGGVRFSEASKMLGKNITFRGFPPSDTCTEHEKSLTQEPANMLTSPYYGEVLVLDFLYVCTLLDNIPGECSIQLIPPDNMTMGSESKLYKLNNSLLLYKRSSSWWPYTEVYQLSLRVSKNSMKVRESVRLNITSTTRPGVEGCNINKVCPKVCVTGVFQAPGIIRKALSPKESNEDLLFFQAWTSDSIARQGPLISLCRADSCVLTIPLGNSDVFIGYTDSFCLSDRDNEKIYCVALLELDNMPYSEMTIRSFLYLIK

SEQ ID NO: 433 - protein, 534 aa, Sosuga pararubulavirus
MAHINSLILLLMLTETGSSVNIQLLQSLGVINTHKRQLAFYNQQPPSYLVIRLLPTLNIPKQNCTLNSINRYEKAVKDIIKPISDNLNWLSDNLIPKRRGKRFAGAAIGLAALGVAVAAQATAAVALVEARANAEKISSMSAALQETNQAVSSLTAAMASSGIAIQAIQNEINNVIHPILNQVQCGVLDSQIASILNLYLIKITTIFNNQLTNPALHRISIQALSVLMQSTKDSLKNLTAGDTQTSLDLIRTNLIEGQIVAVNMTTLQMVIAVYIPAVAKLESAVLLDFISITVSSNQSEVMLQLPSRILEVGNNIYTFKGDQCTLTETTAYCLYSDAVPVNEKISDCMKGIQSSCIFTRIIGSFANRFASVNGAIFANCKSLTCSCTQPDGLIYQPDNVPLTIIDKIKCSKLNIGHLTFNIRDSTNATIDLHTDLSDSQITITNPLDLSAELTQINNSVINSHLHLMNSENILRRIDSGLFSKAIMIFLLVGVCSLIIVVIGLIVWIRFILLHLKSSSHTNRQGSSLFSIDSV

SEQ ID NO: 434 - protein, 538 aa, Teviot pararubulavirus
MNLLKVHLLLMLYPSCICGINKDKLLSIGLVHKSVKNLMFYSQGSPSYIVVKLVPTLGNLPENCTLNSLKRYKSTVTSLLTPLSDNLNYLQQTLTVSKGSRRRRFAGVAIGLAALGVAAAAQATAAVALVEARQNAAQIQSLSESIQNTNLAVNELKTAIGASAVAIQAIQTQVNDVINPAINRLSCEVLDAQLASMLNLYLIHLTTVFQNQITNPALSPLSIQSLQSLLQSTSGILTNMTAGSNLVLNDALATGLITGQVVGMNLTSLQIVIAAYVPNVAKLTNAIVHQFIRITTSVNGTEVIVQSPTQIMEQNEVMYELRSDHCSESVMNIYCPYIDAQLMPPTSTNCINGQLNDCTFSKVVGSFPTRFAAVEGAILANCKYLQCNCLVPPYIITPLKGEMISMINLSKCQRLDLGTVVFEINNPVNVTFNGNYRADVGQLIVTNPLDISAELNQINTSLSNAQTFLSKSDAWLRVSQWLSNSGTIFIILLIGLGIGVIYMVINTYVVVQIIKEINRIRDKDRAHLLKGSVSSISM

SEQ ID NO: 435 - protein, 595 aa, Teviot pararubulavirus
MWSTQASKHPAMVNSATNLVDIPLDHPSSAQFPINRKRTGRLIYRLFSILCNLILISILISLVVIWSRSSRDCAKSDGLSSVDNQLSSLSRSINSLITEVNQISVTTAINLPIKLSEFGKSVVDQVTQMIRQCNAACKGPGEKPGIQNVRINIPNNFSTYSELNRTANSLNFQSRTALFARPNPYPKTCSRFPSYSVYFGIHCFSHAVTDSSCELSDSTYYRLVIGVADKNLSDPADVKYIGETTTPVRVQTRGCSVVSSIYGCYLLCSKSNQDYQDDFREQGFHQMFILFLSRELKTTFFDDMVSSTTVTWNGLYPGEGSGIWHMGHLVFPLWGGIRFGTHASEGILNSTLELPPVGPSCKRSLADNGLINKDVLFSPYFGDSVMVFAYLSCYMLSNVPTHCQVETMNSSVLGFGSRAQFYDLKGIVYLYIQSAGWFSYTQLFRLSLQSKGYKLSVKQIKRIPISSTSRPGTEPCDIIHNCPYTCATGLFQAPWIVNGDSIRDRDVRNMAFVQAWSGAINTFQRPFMSICSQYSCPLSELLDSESSIMRSTTTYCFPSLTESILQCVSFIEWGGPVGNPISINEVYSSISFRPD

SEQ ID NO: 436 - protein, 538 aa, Tioman pararubulavirus
MRIALTAVIVSIHFDLAFPMNKNSLLSVGLVHKSVKNLYFYSQGSPSYIVVKLVPTLGNVPGNCTLNSLVRYKSTVSSLLSPLAENLEYLQKTLTVSRGGRRRRFAGVAIGLAALGVAAAAQATAAVALVEARQNAAQIQSLSEAIQNTNLAVNELKTAIGASATAIQAIQTQINEVINPAINRLSCEILDAQLASMLNLYLIHLTTVFQNQLTNPALTPLSIQSLQSLLQGTSSVLTNITSSSKLALNDALVTGLITGQVVGLNMTSLQIVIAAYVPSVAKLSNAVVHNFIRITTSVNGTEVIIQSPTIIMEQNEVMYDLKTGHCTESDLNIYCPYVDAQLLSPGMTNCINGRLNDCTFSKVVGSFPTRFAAVEGAILANCKYLQCNCLTPPYIITPLNGEMISMIDLSKCQRLDLGTIVFDINNPVNVTFNGNYRADVGQMIVTNPLDISAELNQINTSLSNAQGFLSKSDAWLHVSQWVTNSGTIFIILIIGLIVGIVYMIINTYVVVQIIKEINRMRTSDRAHLLKGSISSIST

SEQ ID NO: 437 - protein, 593 aa, Tioman pararubulavirus
MWATSESKAPIPANSTLNLVDVPLDEPQTITKHRKQKRTGRLVFRLLSLVLSLMTVILVLVILASWSQKINACATKEGFNSLDLQISGLVKSINSLITEVNQISITTAINLPIKLSDFGKSIVDQVTQMIRQCNAVCKGPGEKPGIQNIRINIPNNFSTYLELNNTVKSIELQRRPALLARPNPIPKSCSRFPSYSVNFGIHCFAHAITDQSCELSDKTYYRLAIGISDKNLSDPSDVKYIGEAFTPMGLQARGCSVISSIYGCYLLCSKSNQGYEADFQTQGFHQMYILFLSRDLKTTLFNDMISSTTVVWNGLYPGEGAGIWHMGYLIFPLWGGIKIGTPASTSILNSTLDLPLVGPSCKSTLEENNLINKDVLFSPYFGESVMVFGFLSCYMLSNVPTHCQVEVLNSSVLGFGSRSQLMDLKGIVYLYIQSAGWYSYTQLFRLSLQSRGYKLTVKQIRRIPISSTTRPGTAPCDVVHNCPYTCATGLFQAPWIVNGDSILDRDVRNLVFVQAWSGNFNTFQKGLISICNQYTCPLTTLLDNDNSIMRSTTTYCYPSLSEYNLQCQSFIEWGGPVGNPIGILEVHYIIKFK

SEQ ID NO: 438 - protein, 532 aa, Tuhoko pararubulavirus 1
MVTIIKPLILLVTVILQISGHIDTTALTSIGAVIASSKEIMYYAQSTPNYIVIKLIPNLPNIPSQCNFSSIAYYNKTLLDLFTPISDNINMLHQRLSNTGRNRRFAGVAIGLAALGVATAAQVTAAFALVEAKSNTAKIAQIGQAIQNTNAAINSLNAGIGGAVTAIQAIQTQINGIITDQINAATCTALDAQIGTLLNMYLLQLTTTFQPQIQNPALQPLSIQALHRIMQGTSIVLSNLTDSSKYGLNDALSAGLITGQIVSVDLRLMQITIAANVPTLSRLENAIAHDIMRITTNVNNTEVIVQLPETIMEHAGRLYQFNKDHCLSSTQRFFCPYSDAKLLTSKISSCLSGIRGDCIFSPVVGNFATRFISVKGVIIANCKFIRCTCLQPEGIISQLDDHTLTVIDLKLCNKLDLGLIQFDLQVLSNISYEMTLNTSQNQLILTDPLDLSSELQTMNQSINNAANFIEKSNSLLNSSTYEFNRSVALLVALILLSLTILYVIVLTCVVKLLVHEVSKNRRHIQDLESHHK

SEQ ID NO: 439 - protein, 580 aa, Tuhoko pararubulavirus 1
MDSRSDSFTDIPLDNRIERTVTSKKTWRSIFRVTAIILLIICVVVSSISLNQHNDAPLNGAGNQATSGFMDAIKSLEKLMSQTINELNQVVMTTSVQLPNRITKFGQDILDQVTQMVRQCNAVCRGPGVGPSIQNYVIQGHAPTVSFDPISAEYQKFVFGITEKTLITAYHNPWECLRFPSQHLFDTTWCVSYQILTQNCSDHGPRITVIQLGEIMIANNLSTVFRDPVIKYIRHHIWLRSCSVVAYYSQCTIFCTSTNKSEPSDYADTGYEQLFLATLQSDGTFTEHSMHGVNIVHQWNAIYGGVGNGVIIGRNMLIPLYGGINYYDHNTTIVQTVDLRPYPIPDSCSQTDNYQTNYLPSMFTNSYYGTNLVVSGYLSCRLMAGTPTSCSIRVIPIENMTMGSEGQFYLINNQLYYYKRSSNWIRDTQVYLLSYSDKGNIIEITSAERYIFKSVTSPDEGDCVTNHGCPSNCIGGLFQAPWILNDFKLCGSNITCPKIVTVWADQPDKRSNPMLSIAETDKLLLHKSYINYHTAVGYSTVLCFDSPKLNLKTCVVLQELMSDDKLLIRISYSIVSIMVE

SEQ ID NO: 440 - protein, 588 aa, Tuhoko pararubulavirus 2
MPPVPTVSQSIDEGSFTDIPLSPDDIKHPLSKKTCRKLFRIVTLIGVGLISILTIISLAQQTGILRKVDSSDFQSYVQESFKQVLNLMKQFSSNLNSLIEITSVTLPFRIDQFGTDIKTQVAQLVRQCNAVCRGPIKGPTTQNIVYPALYETSLNKTLETKNVRIQEVRQEVDPVPGPGLSNGCTRNPSFSVYHGVWCYTHATSIGNCNGSLGTSQLFRIGNVLEGDGGAPYHKSLATHLLTTRNVSRQCSATASYYGCYFICSEPVLTERDDYETPGIEPITIFRLDPDGNWVVFPNINRFTEYSLKALYPGIGSGVLFQGKLIFPMYGGIDKERLSALGLGNIGLIERRMADTCNHTEKELGRSFPGAFSSPYYHDAVMLNFLLICEMIENLPGDCDLQILNPTNMSMGSESQLSVLDNELFLYQRSASWWPYTLIYRLNMRYTGKYLKPKSIIPMVIKSNTRPGYEGCNHERVCPKVCVTGVFQAPWILSIGRDHKERVSNVTYMVAWSMDKSDRTYPAVSVCGSDTCKLTVPLGDSKVHSAYSVTRCYLSRDHMSAYCLVIFELDARPWAEMRIQSFLYKLILT

SEQ ID NO: 441 - protein, 539 aa, Tuhoko pararubulavirus 2
MAPCVLFLSSLLLISTISPSHGINQPALRRIGAIVSSVKQLKFYSKTKPNYIIVKLLPTINLSKSNCNLTSINRYKESVIEIIKPLADNIDNLNQKLLPKNRRKRMAGVAIGLAALGVAAAAQATAAVALVEARKNTQMIQSLADSIQDTNAAVQAVNIGLQNSAVAIQAIQNQINNVINPALDRLNCEVLDAQIASILNLYLIKSVTIFQNQLTNPALQQLSIQMLSIVMQDTAKILGNFTIGDKFDQHDLLGSGLITGQVVGVNLTNLQLIIAAFIPSIAPLPQAYIIDLISITISVNDTEAVIQIPERIMEHGSSIYQFGGKQCVYGQFSAYCPFSDAVLMTQDLQLCMKGNIEHCIFSSVLGSFPNRFASVDGVFYANCKYMSCACSDPLQVIHQDDSVNLMVIDSSVCRSLTLGHVTFPIIAFSNVSYQMKTNISIEQMIVTSPLDLSTELKQINNSVNIANTFLDSSNRALKTSIFGTSSQIILIVLLIFTCLLILYVIFLTYIIKILIKEVKRLRDGNSRTGSKLSFINPDV

SEQ ID NO: 442 - protein, 582 aa, Tuhoko pararubulavirus 3
MHNRTQSVSSIDTSSDVYLPRRKKAVTKFTFKKIFRVLILTLLLSIIIIIAVIFPKIDHIRETCDNSQILETITNQNSEIKNLINSAITNLNVLLTSTTVDLPIKLNNFGKSIVDQVTMMVRQCNAVCRGPGDRPTQNIELFKGLYHTSPPSNTSTKLSMITEASNPDDIVPRPGKLLGCTRFPSFSVHYGLWCYGHMASTGNCSGSSPSVQIIRIGSIGTNKDGTPKYVIIASASLPETTRLYHCSVTMTSIGCYILCTTPSVSETDDYSTMGIEKMSISFLSLDGYLTQLGQPTGLDNQNLYALYPGPGSGVIFRDFLIFPMMGGIRLMDAQKMLNRNITYRGFPPSETCTESELKLKQEVANMLTSPYYGEVLVLNFLYVCSLLDNIPGDCSVQLIPPDNMTLGAESRLYVLNGSLIMYKRGSSWWPYTELYQINYRVNNRAFRVRESVRINTTSTSRPGVQGCNLEKVCPKVCVSGIYQSPGIISAPVNPTRQEEGLLYFLVWTSSMSSRTGPLSSLCDHSTCRITYPIGDDTIFIGYTDSSCFMSSIKEGIYCIAFLELDNQPYSMMAIRSLSYIIN

SEQ ID NO: 443 - protein, 537 aa, Tuhoko pararubulavirus 3
MLWLTILIALVGNHESTCMNINFLQSLGQINSQKRFLNFYTQQPPSYMVIRLVPTLQLSANNCTLGSIVRYRNAIKELIQPMDENLRWLSSNLIPQRRGKRFAGVAVGLAALGVAVAAQATAAVALVEARANAEKIASMSQSIQETNKAVTSLSQAVSASGIAIQAIQNEINNVIHPILNQVQCDVLDARVGNILNLYLIKVTTIFQNQLTNPALQRLSTQALSMLMQSTSSYLRNLSSSESAINADLSMTNLIEAQIVGINMTNLQLVLAVFIPSIARLNGALLYDFISITISSNQTEVMLQIPHRVLEIGNSLYTFEGTQCEMTKLNAYCLYSDAIPVTESLRDCMNGLFSQCGFVRIIGSFANRFASVNGVIYANCKHLTCSCLQPDEIITQDTNVPLTIIDTKRCTKISLGHLTFTIREYANVTYSLRTEIANSQITVVSPLDLSSQLTTINNSLADATNHIMNSDRILDRLNSGLYSKWVIIFLICASIVSLIGLVFLGFLIRGLILELRSKHRSNLNKASTYSIDSSIGLT

SEQ ID NO: 444 - protein, 536 aa, Cynoglossus cynoglossusvirus
MSQLFLLYVLLGCTGATRLITTLMKAGTILDQIGPISVERPDVSFQLLVPIIPRNGFKPTACGGDILMKFMQDVRSTLLPLEQINALKKDLMTSRDQKFVGAIIGTAAMGVAVGASVTAGLALDHAYKNRRDIDQLHNAMSNSFDALEQLQDATKGLAVIIKDITNTINRDIIPAINTVNCELSKVALRGQLAAIFQKWLTIYSPILEAPLTSHKSALLTGTLLLDAINAGLSLQTTTDQMMTYAMNGMISVQLMEYNATTASVLLLVSVNARSETPGYKAYRTHSIMIAVGNPARYSVISLPSHMATNGINWYSVSDTCTQKSTGLVCTGSALSPFNEDLDKCVQGDTNRCMWTSSQGGSSFILLKSGILADCNTLICTCNSIAISGLRYISTDCPTPMISGTQYKIQATDLGYFVSNTSISYDPVPPVNISFIDVTSMQSIQKALNRSDRALQMARDALSRVSNGSGMSIETMVAIACGVTGVLVLLIIGLIGLIYAACKRDGTIMERFKHPKADAAYDNPMGPTRTINISDLV

SEQ ID NO: 445 - protein, 428 aa, Cynoglossus cynoglossusvirus
MTNRIFLLFLILGLLTTWTTITIQLITLYNWENESTNTTTTKAEPPQCATSADIIRLEHAVINQLLPNLGSISQGVTQLTSRPGLCYQAHGQFSKYTQLNFDNYGTSTVVIPNWRPNLRCVEAERLERTGAIIVQNTTHAFMRTDNFLAPTSIWTIASGGPDHVTIKILVVTSQVDLRQYYGPYIELGALSTRSVDTVFKDIYSWFFGFNSGYACLFMTRKDDRTSHVECFVANVSTPNYAGALSLPNNTIILPGSSSWVNSSTVLLGTKTTPNNCEAPTRSMYQEHDGICYTVIHYDWKDNRLANSRTGYIMIQRHWEDASSKSLFRFSSNGCRIMNDQHINLPVWWGTLSNRAYVSCTGADESQSCIYHTTSNQNIEGHYPAGLSGVTVFRMQGRTHGLKNGCSISDKLIASGSGTDMQCFLDQPR

SEQ ID NO: 446 - protein, 513 aa, Hoplichthys hoplichthysvirus
MFKFTLVLVVCLSLVSGDFLRNGVLPIRRGEVRAEVRVGEIMIYEPYSALIPSGDTCLLQILAEVNAQADKIFPSINFPNTTGSNNKFIGLVLAGAAMGVASGALATGIAATIMATSNKKHISENRNAINTLRDENIALKAGLDLASSALDEVSMVIGSIQGYINNDLIPVMANMSCEIKKNTFRTRLLAYWLSLVSKYQNLIANPWSEEPSFSEEQRIKNDASIAALVTSKYGIPATEFKGPDIRIRISLIESKDRILLLMASIYRTQLTGRNLVHLPRIPLSDTNGGSVISNWPNYVVCEGTSTSDCYTLSETCTIENESAFCTIIDVDSPINLTCDEDCGYVSSPTSLAFMGDGEGGAIVNCALISCRCDGRNFIGMQHFLEGSCSVLLLKGTIALRLRELGEIIKDPVVINSSSGHLPPAINLQNNISDLAKEMKVVTKDVGDWGALGGLSATPYPFTIWLVILTVMLLSLIVFVIVLMVKMRRELKRLNSANTSSNFHLSMISESSDN

SEQ ID NO: 447 - protein, 537 aa, Avian metapneumovirus; identical to SEQ ID NO: 123

SEQ ID NO: 448 - protein, 585 aa, Avian metapneumovirus
MEVKVENVGKSQELKVKVKNFIKRSDCKKKLFALILGLVSFELTMNIMLSVMYVESNEALSLCRIQGTPAPRDNKTNTENTKKETTFHTTTTTRDPEVRETKTTKPKTNEGATSPSRNLTTKGDIHQTTRATTEAELEKQSKQTIEPDTSTKKHTPTRPSSESPTTTQATAQLTTPTAPKASIAPKNRQATTKKTETGTTTTSRAKKTNNPTETATTTLKATTETGKGKEGPTQHTIKEQPETTAGETTTPQSRRTTSRPAPTTKTEEEAETTKTRTTKSTQTSTGPPGPTRSTPSKTATENNKRTTTIKRPNTANTDSRQQTRTTAEQDRQIQTKAKPTTNGAHAQTTTTPEHNTDTTNSTKESSKEDKTTRDPSSKTPTDQEDASKGTTAANPRKNTEANTRTPPTTTPTRHTTESATSTTGDKTKAKTTRWKSTADRQPIRNSTTAETKTAQSKQPTPKQLSNNTTPENTTPPNNKSSSQTDAAPTEEIEIRSSLWRRRYVYGPCRENVLEHPMNPCFKDNTTWIYSDNGRNLPAGYYDSKTDKIICYGIYRGNSYCYGRIECTCKNGTGLLSYCCNSYNWS

SEQ ID NO: 449 - protein, 539 aa, Human metapneumovirus; identical to SEQ ID NO: 136

SEQ ID NO: 450 - protein, 219 aa, Human metapneumovirus
MEVKVENIRAIDMLKARVKNRVARSKCFKNASLILIGITTLSIALNIYLIINYTIQKTSSESEHHTSSPPTESNKEASTISTDNPDINPNSQHPTQQSTENPTLNPAASVSPSETEPASTPDTTNRLSSVDRSTAQPSESRTKTKPTVHTRNNPSTASSTQSPPRATTKAIRRATTFRMSSTGKRPTTTSVQSDSSTTTQNHEETGSANPQASVSTMQN

SEQ ID NO: 451 - protein, 572 aa, Bovine orthopneumovirus
MATTTMRMIISIILISTYVPHITLCQNITEEFYQSTCSAVSRGYLSALRTGWYTSVVTIELSKIQKNVCNGTDSKVKLIKQELERYNNAVAELQSLMQNEPTSSSRAKRGIPESIHYTRNSTKKFYGLMGKKRKRRFLGFLLGIGSAIASGVAVSKVLHLEGEVNKIKNALLSTNKAVVSLSNGVSVLTSKVLDLKNYIDKELLPKVNNHDCRISNIATVIEFQQKNNRLLEIAREFSVNAGITTPLSTYMLTNSELLSIINDMPITNDQKKLMSVCQIVRQQSYSIMSVLREVIAYVVQLPLYGVIDTPCWKLHTSPLCTTDNKEGSNICLTRTDRGWYCDNAGSVSFFPQAETCKVQSNRVFCDTMNSLTLPTDVNLCNTDIFNSKYDCKIMTSKTDISSSVITSIGAIVSCYGKTKCTASNKNRGIIKTFSNGCDYVSNKGVDTVSVGNTLYYVNKLEGKALYIKGEPIINYYNPLVFPSDEFDASIAQVNAKINQSLAFIRRSDELLHSVDVGKSTTNVVITTIIIVIVVVILMLITVGLLFYCKTRSTPIMLGKDQLSSINNLSFSK

SEQ ID NO: 452 - protein, 263 aa, Bovine orthopneumovirus; identical to SEQ ID NO: 107

SEQ ID NO: 453 - protein, 574 aa, Human orthopneumovirus; identical to SEQ ID NO: 106

SEQ ID NO: 454 - protein, 298 aa, Human orthopneumovirus
MSKNKDQRTAKTLERTWDTLNHLLFISSCLYKLNLKSVAQITLSILAMIISTSLIIAAIIFIASANHKVTPTTAIIQDATSQIKNTTPTYLTQNPQLGISPSNPSEITSQITTILASTTPGVKSTLQSTTVKTKNTTTTQTQPSKPTTKQRQNKPPSKPNNDFHFEVFNFVPCSICSNNPTCWAICKRIPNKKPGKKTTTKPTKKPTLKTTKKDPKPQTTKSKEVPTTKPTEEPTINTTKTNIITTLLTSNTTGNPELTSQMETFHSTSSEGNPSPSQVSTTSEYPSQPSSPPNTPRQ

SEQ ID NO: 455 - protein, 537 aa, Murine orthopneumovirus; identical to SEQ ID NO: 109

SEQ ID NO: 456 - protein, 396 aa, Murine orthopneumovirus
MGRNLEVSGSITNLNFERTQHPDTFRTVVKVNQMCKLIAGVLTSAAVAVCVGVIMYSVFTSNHKANSTQNATTRNSTSTPPQPTAGLPTTEQGTIPRFTKPPTKTATHHEITEPVKMATPSEDPYQCSSNGYLDRPDLPENFKLVLDVICKPPGPEHHNTSCYEKREINPGSVCPDLVTMKANMGLNNGGGEDAAPYIEVTTLSTYSNKRAMCVHNGCDQGFCFFLSGLSTDQERAVLELGGQQAIMELHYDSYWKHYWSNSNCVVPRTNCNLTDQTEILFPRFNNKNQSQCTTCADSAGLDNKFYLTCDGLLRTLPLVGLPSLSPQAYKAVPTQTTGTTTAPTSETRHPTPAPRRSKPLSRKKRALCGVDSSREPKPTMPYWCPMLQLFPRRSNS

SEQ ID NO: 457 - protein, 476 aa, Arboretum almendravirus
MIAHKLILPLVILTSFQRIKREDITCPVYNHKNVNVSSQSLLQFDMRQVSFNSGEEIINHNPLVTGYLCRKLSYETSCYANLFTSNTVEYKLKILPITKKECATGSNSQVKSFPTPICNWSMFGSNTVKETKQYIEYEQRSYKLDMVSGKLKHVEEIFDKCYEEYCVLKDNSGYWIRDDQDEKKYCPKLEDQKIPAKLKVIDQFEYLEVAQHIYDMQELCALEVCGNMLIHIPDIGNFIGDDRFMKKLKKCKSLPSLRNAIENNSEDITGNEKCLDFRLKMLGNPDKSIKYHDIRNLHPRSPGINRVYRLGENNTLESAIAYYGSTGLDKISKKLNYWVNCTEDKVCSYNGYMGKDKLHLRSKLDSETYQDIFEVDDELIVYQPTRNISESFYKDVIHYELLDKMTQNFSIFNSNYYSKIIYALLIILAVFFIYKIMKLLTLRCFKNQSKFGKFYQISTNKSQELDMMRKDISQWK

SEQ ID NO: 458 - protein, 451 aa, Menghai almendravirus
MHVIIPVLMITAFKAINFNELLCPDGKEMKVDESNFGLLNKYMAPEYDINEGSLNPYEIKGRDCYSAVFKTGCKFHYFGSNDIIQVIEKKTTDRKNCNQVSTDVLTFPEANCVSGLFDNSYHYKEIEYIVTKPRSYMYDPSTGEIVDDKNIFDKKVDNVYHYKDNKGYWTMDETQPATTCETFKQHESSEVEVKIWKSRMNNKSLIDLGGKIYDMDELCYHDHCGVKIAVTKDHVYFKLPTNLEIRKCSFDYKKVYLQSEIIQEKSELKDCLEAKIDMAWMKSINYEDLKKFNPSSSGIHPVYKLNNNNTLMKALAKYSEVNTTELHKYLEWVRCGNKTKCTYNGVIKADLVEIYGQKLTEKDFAVHVDELKVGIKAYPRDTINHSDHTEEKTYLKSDNSFVSLFFIAAPWISEGILILIIVCILIKYIKPKNRRHRDIFLRRNNQDFESW

SEQ ID NO: 459 - protein, 470 aa, Puerto Almendras almendravirus
MITHKYILPIIVLSNFMPVKRDDLTCPIYNHQNVEFVNTTITYIRLNSVLLQSKSLELKQMPYVRGHICQKIRYITTCKANLFTSNEIFYKKEYLTVTKNDCEMKAVHETGEYPAPICTWSLFGSNLHNEEIIVTEIQSHDYHYDLFNGKIKDSEYLFEHCTLMYCKLREHKGYWIKSEPTKNDICPIVQDDEIVAELKFYNENHFLKINHHLYSTEEVCKIKYCNNSLLFFKDIGFFNIKSTLQKMDKIFKKCTKIEDLRYIIHDNVEKIDNLNDCLNFKLNVLTNKDRTIAYHDIRKLHPKGTGINRIYRLNGNNTLESAIAYYGSVESNETKIYLDYWNDCSKTHTCTYNGYMGKKGLNIRARLNIDLFQEVYEEDSSLLIYNGTTDLSTGTIGELTKGDANVTFTTKEWIPHISNYIIIIVFCLLSGAVFIIMINIYNRIMVMKRNRKAFYNRENDNRVIYVNDWK

SEQ ID NO: 460 - protein, 702 aa, Santabarbara arurhavirus
MKLFVLAIVCLGLRSRVINCQDKQRYVITNKGWLYDTVDNWYLEPYRPFGPPKTIERQIEEKLNLTKGNIPNKGSYPSESKMYMYNWPFGPYLWHELTPDSNIGCPKFKSNQGELNNINTKITVKRPSHPDGLFVKGYICEGLEWVLTCSETWYWSVSFTKQIKSFTPTLDECQYSVKAYESGEPITPYFPEPLCFWNADHTESIKFTITTQHSTLFDPYRGMLDDHTMVVNTCPYNSTYCKLKDVNKIWVRDDNDKYRTHEICKIDTWEEFDANVYFLDLPDNANSLDANWKNHLLIEGEGIGKKDLSRACRMFFCGIPGIRFPDREWWSIKIDGHNNEVEYQNLDMIPECTNNQTIGLSHPHFKDSEEKIEVLDIIKTVRCAETLSKIYASFQISPFDLSALAQEHPGIGLVFSLRKQDNGRSPKIYWSYANYKLIEVSLDQNSEFDTSVLGLKQNRTNLFVDSRLNEHQNETMPITTSPKREGSLIGWYHNQEVWSNEWYAGSVAGLHEVGLNGIVRESLGDSKQCVKNGATLNCSNKPSSITKYKIIFPSAAYKMGLVTSMITKGIPISNILRPTDMTQKEFDLENPNDIVRETDSINRVDIVNSTKHWWNGITHSFSFGFKSLLAWVTTVIHISIIVVCILIIVKLYKTCKRNQSQATHATKRTGKMLDTIIGEDHLYDTVKTPSRNEDIRLNLFNH

SEQ ID NO: 461 - protein, 668 aa, Xiburema arurhavirus
MMMQKVIVLAMVSLCASVHRSVHKIGNLVLCPNSPMGICLPGHHPPIPTTKKPSVRNIARLPREILNRPEMKDIGVVIIDRRLDGSSIHGKVERATIQRKQQNPQEVREEEYDQVEGKVTYMNWPSKSGEWTENFGPTGPVCPRFSSQFYITHDKLIRAVLTRPEHPEGVFVDGYLCEAQIWSSKCTKTWYFSYQEERSISGAVAEVEKCFQALELQKAGNPVKPEHPLSVCYWNAEHTESVVYHLITPHTSTVNPYTNKIVDPLFLKGGCSLDSHICQTSKLSVMWLRTGHDSPSMVCNVDNWKKQQIVLHEVDMETHEKGKWARRTILEGDHLGTKVLESGCRTKFCNLNGIRFDDSEWWTMDPHEDFQHNPLYGRIRDMISQLPICSEEKSKDIGIAHPNFETSFLKKEMGNMLRALRCNDAVGKILEGESITPVDLSALAPTSPGPGIMYKLEETEGGQIVLKWAHANYSLIRVSPIPNTDELGYAKGGSKIIIKEWTNTTIPGIQVGPNGILKKHLMNGSSVLLAPQSMLQLGELDPSFSRRIDVNHIKWTEDTGAETLSEEELIPLKNGSIIRHNAMDWIEMWVHEVGDVVSGWSSGIQAVISIFFIFVFVAALYKLTQICIRIKRRIHPSKKKIQSPDPEADADLIGSKPERDNRNQTVFG

SEQ ID NO: 462 - protein, 591 aa, Bahia barhavirus
MISNMFFLFQLSLFLQFIAGDESLETITAPETPDPILLKGDTKYLFLVPSSVKNWKPADLNELTCPPLISKPDTSEMTYFSTDVMELQKHHELAPVEGYLCSGLRYKVICSEGFFGQKTIAKKIENIEPDSKQCLDDLSKFKNDDYLLPYFPSEDCNWMKETPTHKDFIVFQKHFVKYDPYNNGFYDPLLKKDYCDTQVCETEHDQTIWITEKSIENECIFNYPIKKHIFHTADFGKMIIDYELNQWTSVEDGCLINYCGREGIRLSNGMFFVGKFYKNLNNLQTCSAGTKVSYKPLTSKLEEIENEIILDQERLLCLDSIRQMTATKKLSFYSLSFLEPKSSSRHKVFRIHNKTLEYTETEWHPIMSFNFDEPNKIGIDKNGKSVYWNEWVPSGISGLLSGFNGVYKKENETKVTIARLETIKEDYDREMMIDHELVEVEHPKIVHLKRENITGSRVEIVNKEHSDVSGWLSSVLSSFWGKIMMTIISIILIVIIGLVLINCCPIICKSCIKRYKTKEESRNRHRLDREDNGRLRRQHRVIFNNQSNDEENAIEMVEYTDTPRPLRPIPDATTSDTESRSPTTAHSFFNR

SEQ ID NO: 463 - protein, 537 aa, Muir barhavirus
MKSVFFFFVILFNTMDADLSIPLGNTNNLPGLTTPLEPIVEGRSRTSRKEKDFGEMTVLPLRRLEPWRECAIADLQCPPRYDFGEKIGSLITTEKLWPVRGLSVLQEGYFCTKTSRDRTCSTSFFGSEDLSGSEEYLYPNDSDCLKEVKSLESGRYSPPVWPEHTCAWMATRTVTLVQYQLNLHNVLWEDIGGTYHDAKLKGGKCSTRICSTNNPGVLWIRGKKANHLLRPEDRLPCKIYENKTSSILQVHCDYHHPLHFKVGACKFSYRGESGIRSEEGVGLAWDLKKGSKIARYVGPECDKKKTPIYQWSANSKFRYDAATKADDDLHARCLDALVRIREHKDISQWDLGYFYPSSPGPFPAYRLNKSSKVLECSKYLFTLKEVKSGRSLVDYLPEESIIPDPRTGEKLGVSGLIVKNDSSVYVPHQRSNQMISWEHHLGPKDKVEISRMSLTPNVDDNTLLFSEDPQNHATENGTSQATFLSHLGFGIEHLFYTLLGLSIAGLVGVCVVKVCLENAFKCGCKYCSRSDLDDYSH

SEQ ID NO: 464 - protein, 537 aa, Caligus caligrhavirus; identical to SEQ ID NO: 463

SEQ ID NO: 465 - protein, 542 aa, Lepeophtheirus caligrhavirus
MVQLVLQSFWTALILNLSIPPSSGDIQDNTIEWRHPVFSVPDKGVEVNLMIHGPIKYPWKTCSRESFVCPPTVHDGIEEGLIKEILDLEVPDNLDKAVIDGYLCHKIRRRTICETSFFGHQTITYHRYRLVITKDNCREVMREYEEGSYEPSGQPDPECAWMSTDVSDVDIMEITPHPVFFNPFDSSMEDAVIKGFCKGEFCQTHREGTLWIRKSSSKPALDYKKVSCNFFRGEEITDHLKWLIKCPRFPYFKVNKRTCRTILDGKSALGNPDGLIIITDLGKKGPLPTCSKKVKFGLLKSSGQIQSGLEEIKDDFLYERCIDSLSRIVHQSSVNFRDLGFFYPRSPGLHPLYMLKDKKIWCNRALFEEKKVTLDDKSLEKTFVHYSWMRWKNTSLYQSANGVTWNKETNSSDSGTKYHIPHLMEMSASLAITHTRGHSVAYPRTFHIRQNMDDPLTDVDTHVQKRHPLGENFAKWWDNLGEVVKGVISTITTLIVILVSLFIVWVLVFCLKKIGGGCRENVNELSKPNNEFGMDSWGSQLP

SEQ ID NO: 466 - protein, 532 aa, Salmonlouse caligrhavirus
MLTRTARTTSTSLFIKLSILCVLTDHITSGDKNGTTDEKKSHFVYPSRIVGSLLPCLPEDLVCPPTVKDYATVGLTPTKKKLLMPAGGKTEHVGGVLCHLVKKRTTCWTSLWGSNDISQQEYRTPVVLDRCRLAVNNYLRGEHENVEFPESECSWMSTIDMDITGAIITPHETFFDPYKTSVYDKHLIRSCRNRVCETVRRDLVWFALEEFPLPSDLFQKQDCIIYSSDPDNEATLIKCEGYPYLTISNQSCQINYGGRTGVATPHHFAIFGNIPGHDSLPPCSDNVIIGVTGPMEKSIERRGEYADMNLRERCLDAIDRITNENTVTLRTLGHFMPRSPGRHPVYILINSTLMCGSAKYKEYTGSLDNDNLWTLLKNSLWVHWADDNHLSYNGVLRYGKESQPEIHIPHLNDIRDSLVALHTEELELIPTNRVVFIPDKEVPLNASIPTQRKTTKIGGDLGTSFNAIGSWFQTNMSLLITLGTGMALLGLGYVLLMIVLKCIKGLKKPPKSDSINLNLQPFQPSGKDRAEH

SEQ ID NO: 467 - protein, 820 aa, Curionopolis curiovirus
MDLVRFSIALSVFLCYGTPPSQGQAIVSIKDSCEAKSAPWIPCEKFDYVKNATGSGIKCWIFCSRSGFYSKTGRFIRCIQGDPEAKYIKSCRRQIEKRGKEKMREGTRGKRKTSEPKEEGVRAKTDFTPDESRRLNNLTKVFRKVEDKDLNDFKKFILEKGLETKIKLANDGKISFRDPDCGENKDYPCHRIHQIIEGVNENIDYINEILSLKKMKEELRLRERESEEGEFPGLLNTTNRRGFLLHYPVELGNWSRLEDPSQIKCPSHHKDMLSNPRRLGKYNLDIIVRRPRIGTFETVVPGYICQGMQWTSTCNEMWYFVTYHDRAVHYITPNKLKCLQNIRAHKRGEHIKPYYPLEECNWNSETTKTVDYFMITPYSPEVDPFTLEFKSEIFPDRTSCRPGDEICVTDDDSKVWFPDEDDKLIARGHCPDETWDESHLTIHPEEMPENWEDPQSPWVSDYILKGVLFGEKRVKKSCLLEFCGTSGLLFEDGEWWELNVFSREKGRESLTKIFIEQEEIRRCNGTETRVGVAGKETDEKALLNAVLSKNAYERCKSARYRLIENKYLRLDDLSYINPRESVTWWAYRVRAGDDERTFKLEKTTGEYRYLQVPPSLEQHVTDCDGQENCSVSIGYYRGELINSSDWTRTGHDDVYVGVNGLLRKDTGNKTIVLYPPLMKEYQEIFSDSGESDDEAFIYKPDIHEKKGKPKEAEDEKDEKSKKNKTPIDDIKDWWSNIKGEWHLIKGILIGLFTFALLIGVVKLGVFIKSSFRKRRDDSIPEGKDEEIGIKMQSRRSRQNIYEEINEVSPTMTRRGRNIFN

SEQ ID NO: 468 - protein, 818 aa, Iriri curiovirus
MKKTMETIKNFILILSVAVQLDTGHGMEFALIRNTCDTRSMKQVPCQHLISVRESTGPKGKCLIFCAKEKRRWAEGVESQCLQGDPTSPQVVKCKERIEKGLERLTVLTSSKRKRMREPFRARGNQTKEEGGRLIRISDVLKRIDHKDLEQFKKDVLEKNVETFLYVNSSNLIDMHKNYSCSPPDGFECYSIKRAIDDSNEKVLYVQKAQKEKDKSTWSKDLLSDAYRREEGTIETATERGFLIHYPIESRDWSNLTDPSQIKCPSHQGDRLRKSGTLRNVDLEIIVRRPRPGNFKTAVPGYICQGMQWTSTCNEMWYFVTYHDRAVKTITPNEVKCLQNIQSHKRGEDVRPYYPLEECNWNAETTKTVDYHMITPYSPLVDPFTLEFKSEIFLESSSCSPGDKFCLTDDTSRIWFPDQDDPLIALGHCQDTTWDESFLTVHPEEIPRNWSDPNSTWTNDLILKGILFGEKRVSKSCILEFCGELGLLFEDGEWWEINVFSKEQHRSRLTKQFLEEEKLERCTGTESRIGVVGKETDEKALLDAALRRSGYEKCKAARYRLIENRNLRLDDLSYINPRDSVNWWSYRVRAEDSDRLFRLEKAISLYRLVQVTPKLLKGGQVCEDKRNCSLIIGYHKGKEIKSSDWEETGHDGVYIGVNGLIRRDTRNVSYIYYPPLIKEYEEMFSDSGEIEDEAFIFQPEIHSKKTKPKSDDQDSSTDSKKNKTPIDDLEDWWKKLKSEWGAIKGTLIGVTLIVGLILLLKLILAVKRLISRKRGKKSEAGKEEKEKEMVRFRATPNIYEEIDERSPTRPRGRRTIFT

SEQ ID NO: 469 - protein, 784 aa, Itacaiunas curiovirus
MKDLHTLVLLVVLIKLYKGGSSVHTPMTRCTVYAPQQRIQCNRFDKVFRIRGGGVGIILCRRSQKFDPNLCTCFRDTNPGALSCYKLMTSKGSFPSEKESRGDEKPQESGTLADYLNVTFLEKTGKLGAKKGEDPDESRLLDAAIKSGGLGVDFNGHLKILNEESLTSNLNETDVNRIKGLLTSWNKDRLGGQPGEYDPNKWKKDAKEMTEEDENSERHRVNSTRLRMIFHPEGPYNWTAVTDPQRIRCPRPRLYSKSVDHNFRGVAKRPRVTETSLVRGYICEAHRWVSECEEMWYFSKYYTREIQTTVPEVLACIKAIKDLKSGEPEIPTFPLSLCNWNSKTSQGVIFHTATPVDILLDPFSMTYKSTLFPEKWPCNAHALYCLTSKPWRKWFPDEELTRLSPQLCKTTSWEAFPFFGDVIDLPSKPRDPSSLWTPHVLVENEIFGQKNLNDGCLMDFCGETGVKFPDGEWWLFSVLHGPRGGLKNLTSALSRCKNSSSLHQIAEVFPNLEDSGRRLELTSRERYERCLDVKDKLTAGYFMNPTDLGYIGQHQEGPGTAYRLKRLGTNKTGQLILMESPAVYRVLIHKEDYDEEGFRVWENSNSSWNESGKLSVQFGITSKGLKFEAEWTSLKSEGRWVGVNGILLLKGEKPGTWVISVPDSRQDLEDILSWEHLEGERVVYDERVILTSSDIELDDLGNTLDTEVETKNIFSGIIKWFDSVYSSVSSYIYIIGVLVAVGLGIWILTKAKRFIVRDRSPGNQTSEITIPMNRNRREDQRSYI

SEQ ID NO: 470 - protein, 758 aa, Rochambeau curiovirus
MKKTMELIKVIPVACLLYIFLSRHILVGQCKDKIQTGKNTSPPKSRNFKGSPPDSDSVLAKTNLTQEESKRLSNISQVLEKIEDRDLAEFKRIILDKNLEKSLSEDKDGKIHLNAPKCGENDSYRCHRVNKILENVNDNIDHLNDLLRKSSGSNLREKLRELDDSSEGGGKGSKSDGHGSFLLHYPITVGNWSELEDPTLIKCPSHHRNQIGHSGSDRRLDLDIIARRPRTSTFQTSVPGYICHGMRWTSSCNEMWYFVTYHDRAVTSITPNKLKCIQNIQAWKRGEHVKPYYPLEECNWNAETTKTVDYHMIIPYSLRVDPLSLQFEGEIFLDSQSCKPGDSLCFTDDNSKIWFPDDDDKLVATGHCPDESWDESSLTIHPEKMPNDWSNENTSWSQDYILKGILFGEKRVRRSCLLEFCGAMGLLFEDGEWWEISVYSADSKRESLTKLFLKEEGINRCNGTEERIGVAGKETDEKALLDAVLRKTGYEKCKAARYRLTENKHLRLDDLSYINPRDSVMWPAYRVRRQSEGSEKYFSLETAMSEYGMVQVTRSLQMLGQKCYGVENCSMIVGYNLGKEIRSDDWTPSGHPGVYVGINGLIRKDDENTSRIYYPPLSKEYESVFSDSGEMEDEAYIYKPEIKHKGNVNPKKDDEDSSEEEKKNKTPLDDLSDWWKKLKGEWKLIKGIIVSFLVFLGLYLIIKCCLKLRSVIKEKKIKKVVDEEKSLELKERRAEPNIYEEINETSRPRVRRGRNYFN

SEQ ID NO: 471 - protein, 660 aa, Adelaide River ephemerovirus; identical to SEQ ID NO: 172

SEQ ID NO: 472 - protein, 623 aa, Berrimah ephemerovirus
MFRVLAWIILIKLTSGSKIYNIPVNCGRLESVKLHEIKCPQRVNELSLQAHHQLAKEEHYNKICRPQLKDDDHLEGFICRKQKWITKCTETWYFSTSIEYQILEVIPEFSGCNDAVKKLDQGALIPPYYPPAGCFWNAEMEQEIEFYILIQHKPFLNPYDNMIYDSRFLKPCTIEDSKKLGCQLKDITGTWVPDIRVKEVSEHCNHQHWECITVKSFKSELNEKERLWEAPDIGLVHINKGCLSKFCGRDGIIFADGEWWSIENKTNEDVQNFEIRECVGKKPGFRMHTDRTEFEELDIKAELEHERCLNTISKILNRENINTLDMSYLAPTRPGRDYAYLFKQTKWQEKLCLSLSSSLGVIKNCSINWKSSTKGGMVKKDHVGIGSYERTMCEYRPFIDENEDGYIEMGELKGHKMSSHHTMLELPPSGGSQNQKINVTLNGMIFVGENKLYLQTKSAYDGIEEYQKLIKFEVQEYDNIEENLIKYEEDEKVESINLTPHENKNVSRTDIVREIQRGGRRVLSAVAGWFTSTAKAVRWTIWAVGAIVTTYAIYKLYKMVKNNSKSKNTEDIEIESLKPQPRKEVRSPKIEKKYQDAEIGLYEEIKSVKSDDKYALESRFFDH

SEQ ID NO: 473 - protein, 623 aa, Bovine fever ephemerovirus; identical to SEQ ID NO: 174

SEQ ID NO: 474 - protein, 649 aa, Hayes ephemerovirus
MISKILCWMALGQCLRVTRAETESRVFNVPVNCMEERPIKPTEIVCPKRYNELSLEAHHTLIEGEEKIEQICRPALRDDDHVDGYICREQHWETECEETWYFATVINYHIRETIPSPGDCISAVKQFKDGVLIPPYYPPAGCFWNTKIKETIKFMVLTRHKSILNPMDNLVHDSQFINPCDLKKTQKTGCKLKDVTGLWIPEIEIGLSSEHCSRKHWECIGIKSYKSELDEKIRIWEAPEIGIINITKSCKQSFCGFKGVVFDDGEWWGYANTTEDELIKAHVSDCKDRKPGIRVHNDHTDYETYDIRAEMENERCQNTISKILNSEPINTVDMSYLSPTRPGRDYAYRFKQVNWTETFCLRWVQTGLSKDCNKFWKYSDRGGKVTKDHVGIGEYTRALCEFRPIIDKDGDGYISKEELGKHNMSTSFSLMRLDKKGGNQGADSIEVGFNGIVRIPKSEKDGEKYMVRMTSVYDGLEQRNRLIKFEVLEFEDVVAKYQGEGNYDVNDKVVELIPDNQKNISRTDFVRTIANGGKEIISGIVGWFTGTAKIIRWTIWAIGALVTTYAIYKLHKLVRGKNKQESQNYQGEQGGQTESKPKWFKRGRREETPKKSIRLENPLYEEIDIDDNYSLRHKDSGRLKLKKDGFFDV

SEQ ID NO: 475 - protein, 640 aa, Kent ephemerovirus
  VARIANT (633)..(633): Xaa can be any naturally occurring amino acid
MNLIQFTCVIAVIESINTYRLANLPFDCQKEHEIPVEAIDCPLRRNELKVDHLQKGREFKICKPKLSEDDHVKGKLCRIQKWRTKCTETWYFTTFIEYSVVDIQPNKLDCAKEWERQKAGFPVVPFFPPAVCYWNAINEIAETYVTLVDHPVLEDPYNSEVIDPVFYGTRCSPINKFDTHWFCKSTNNLILWMSDKDSLRSQHCDIRTWDCITVNSYVSWEEDHLNHKILRNSTIWEAPDIGRIGLYDACKIDFCGVEGLRLNNGEWWFLEREGNFYGYDYHTMPKCDNNVKIGVKTHVDRTLFEEIDIKLELEHSKCIDTIIKMRSGIDISPDWMVLNIPSDPGKNYAYRFEQESKVLYYCYNAKLRELQEISESQSACNDSKRQIKIFRKRDIAKIGKYKRAVCDYKTVYIPEIDSNDVGYNISSWLFAIDNTTIETKINEYKWSNLTGDQNNQYQLSWNGILKMSSGRYLINTFSLLDGLVHESQLSKLEVRSFEHPKMDKDSLYFHFLNDTGETVEIDLNDDNKLDRTDIIKSATQKIKDFYHGITGWFSGLTVMIRWILWIIGAIVTIYIIVKLKRKVSKKKPDKTPDTTVSRFFRKLDKIKSVPAHVVKSKKKTNSSSGNKSTDDTXEMINFYN

SEQ ID NO: 476 - protein, 435 aa, Kimberley ephemerovirus
MKIEKICRPQIKDDDHIEGYICREQHWTTKCTETWYFSTEIEYTIKETVPNQADCQKELEKLKRGISIPPYYPPAGCFWNMAQSEKITFVVLVPHKVLQNPYDMKLYDPGFIEKCDVEKAKTKGCKMKDITGLWVTNNDGKNTSEHCNKDHWECIGIKSFRSELNLHDRLWESPELGIMKLNKACKKNFCGYKGVILEDGEWWGYTNVADNEIEYVHLNNCDDSRLPGFRIHQDRTEFEEFDIKAEMENERCMNTLSKILNKENLNFVDMSYLSPSRPGRDYAYLFEQVSWDETFCLTWPDSRKSKNCKVDWKVHKNAGLVTKKHGAIGTYYRSMCMYYPIEDTNKDGILQKDELKDKGIPGKNRYRTLKRSKNDYGEDSEFNITYNGMVVVNESFHMAVKSIYDGTEDYNSLLKFEVSEFDKIDLNEAYKEEEN

SEQ ID NO: 477 - protein, 640 aa, Koolpinyah ephemerovirus
MKSLTRTTLILILFGQSISYRIANLPFDCENEHEIPVEAIECPTRKKELKVDHLKEGREHRICKPKLSTDDHVKGKLCRIQKWKTKCTETWYFTTYIEYEVVDVMPNKIECAKEWERAKAGFPIIPFFPPAVCYWNAENVISETFVTLVDHPVLQDPYNSEVIDPIFYGTRCSPINNFDSHWFCKSVNNLIMWMSDKDQFKSPHCDIHTWDCIVVKTYVSWDEDHDTHKYLRNTTVWESPDIGRVGLYDACKKEFCGVEGIRLNNGEWWFLEREENYYGFDYKDLRKCKEGETIGVRTHVDRTLFEEIDIKLELEHSKCIDVLIKLRSGIAISPFELGYLAPSSYGKGYAYRFEQETKIIYQCYPRIDRVPQIKIVTDNAQNCSDGKMRYMRTFNQTRVGKYKRAVCMYKNVFIPEAQQDKEAGYDIGKWQFAGSNDSIEGNISKNGWSNFRSQSGSEYQIGWNGMIKLTSGRYLINTYALLDGLLHEAQLSALEVKPFDHPVYHHMDDFIKWLNGSSINEERDLLDDSRLERTDIIKSAGEKIKGVYHNIVGWFSGVTSVIRWVLWGIGAIVTLYVIIKIRRVMKKKNNENEGKNEVKQFFEKLSKIKTHKSDNVLPTNKAGIGKDKKDDEYEMINFYS

SEQ ID NO: 478 - protein, 639 aa, Kotonkan ephemerovirus
MKSLYYSLFLLFNAKNIITYRIANLPFNCENEHSIPVEAIDCPVRRNELKVENLKQGGEHRVCKPKLSTDDHVQGKLCRIQQWKTKCTETWYFTTYIEYEVVDVMPNKIECAKEWERTKAGFPIIPFFPPAVCYWNAENVISETFVTLVDHPVLQDPYNSEVIDPIFYGTRCSPINSFDSHWFCKSVNNLIMWMSDKDQLRSPHCDIKTWDCIVVKAYVAWDEDHNTHNYLRNTKVWESPDIGRVGLYDACKKRFCGVDGIRLNNGEWWFLEREENYYGFDYRGMRNCRAEETIGVRTHVDRTLFEEIDIKLEIEHSKCIDVLIKLRSGITISPFELGYLAPSSYGKGYAYRFEQETKNIYQCFPKIEKVPQIKYITDDLKNCKDNKTRYARTITQTKIGNYKRALCNYKNVFIPETKQDQQAGYDIKMWTFAGTNDSIKEHIENNSWSPFKSQSGNNYTIGWNGMIKLNTGRYLINTYALLDGLIHEAQLSALEVKSFQHPVYQNFDDFAKWLNGSSIYEERELLDDSHLERTDVIKSAGEKIKGIYHNIVGWFSGVTSIVRWILWGVGAIVTVYVILKIRRVIKNKHDEKDNKSEIKQFFERLGKIKTHKGDNNSVPNIKGKRDKKEDEYEMINFYS

SEQ ID NO: 479 - protein, 662 aa, Obodhiang ephemerovirus
MALFPVTIAITYMSLINSAICEKYVTIPINCNGEVEINKMDVMCPNRYNVLSTNHLFKGEEVETFCRPSLRENDLLDGYLCRKQKWEVTCTETWYFVTDVQYQIIEEVPTVTECLEEKERKLQGEYIPPYYPPTNCIWNAVDKQYRTFIILIEHPVIEDPISMKLMDSKFNKPCDPVHGKVTTCDTYNPLVKWVSKETNGYSLHCQIKSWECIPVKLHHSYEDVLDKLYLESPDFGVVDASKICNMSFCGHEGILLENGEWWSIYRSGFTNGYLQNHKSINNRIESCSDRKPGYKLTKLDTTYMDLEFEIELEHEKCLGTLEKLQNGEYVTPLDLSYLSPSNPGTNYAYRFEYKNKTVDKCVQLEYTYEAGDCKIMFDGREGHGAYYNWTTIKLDKIKRAVCEYHTFSFDLKNKKHTYSDKDDPRIQINKTFVETVLKSTPLIGRNEEHEGNMSWNGIIIEQAKDSEEINVIVPSTSQYNHIVIKKLLRKLDMVDYYGYKFDSLSGSVSYNEIKPILRSENVQNAERVDVIKYIKEKGSYIINGFTGWFSSLGKMVRWTIWGIGLIFSLFTLYKIITLLRKHSNLNKKEKEGQAKSTIMTNNNSSETNDFKESIIISDHPKGVARKLFDYFSKKSGKRQNIYRQATSDSTGGTYEEIHFFNV

SEQ ID NO: 480 - protein, 649 aa, Puchong ephemerovirus
MISKIQSCIIFGLCSRVFSADIGSKVFNVPVNCVGEKPIKPTEITCPKRYNELSLEAHHTLIEGDEKVEQICRPALRDDDHVEGYVCREQHWETECEETWYFATVINYHIREKPPSLSDCITAVKQYKDGILIPPYYPPAGCFWNTKIKETIKFMVLIKHRSILNPIDNLVHDTQFINPCDLKGAQKDGCKLKDITGLWIPELENGLSSEHCSKKHWECIGIKSYKSEVDEKTRIWEAPEIGIINITKSCKQSFCGYRGVVFDDGEWWGYANETEAELIDAHIPTCSGKKPGIRVHNDHTDYETYDIRAEMENERCQNTISKILNSEPINTIDMSYLSPTRPGRDFAYRFKQVNWTETFCLRWAESGLIKDCRKHWKLSDRGGKVTKEHVGIGGYTRALCEFRPIVDQDGDGYISKTELGRHNMSAEFSSMKLGTRSSNQPVDSLDVGFNGIVKVTDDRTREEKYMVRTTSVYDGLEQRNRLMKFEVLEFEDVVSKYQGEGHYDVKGKSIDLTPDEQKSINRTDFVKTIANGGKEIVSGIVGWFTGTAKLVRWTIWAVGALVTTYAIYKLHKLVRGKPRSEEDRSQAEDRAEENKRSSWFNSGKKNDLRKNPLKHDNPLYEEIDLEDTYSMRKKEGWKTDRTRDNFFDV

SEQ ID NO: 481 - protein, 609 aa, Yata ephemerovirus
MMYLFLLILSYTTLSDCLMKSRLVNLPTNCRDETPIDKEHVECPFRRNELRVDHLQRRELTKLCRPKGQEDDHIEGYVCKVQTWRTTCLETWYFTTYVKYDVVEETPTPSDCFKELERIRHGVPAVPYFAPSVCYWNAENTIRVTLTTLTPHNVIEDPYNLKLLDPSFPGGICNGTRSGFCYMKNERSLWIPSSSSHSKHCQWKGWECVTAHILNSWDESRVNQDVLVDSTVIEAPEIGRIGIYDACQMTFCNVTGIKLATGEWWVPHDYDDKFRKSFDRLRHCSSDEKIGVRNHVDKTLFEELDIKAELEHQRCIDALMKLRNGESLNALEMSYFAPTTPGLGYAYRFVQQKKVYSYCIGYADSYDYRICKKYYTQKKGRAYGGYYNFTKTILGTIVRGLCDYKTVQIPMQIAGIRESRMSRSSLWRLPLTNETMEIHLKNYSWSLLENEQTNSIYNLSWNGFIQKGGDYIINAFSLYDGLLRDIQVAKLEVMSVEHPHVIEDHELVDPIIKHISDNSKLDRTDVVDEIEKKGKGILLTIKGWFSGLSQIVRWGLWIIGGLITVYSMYKINKLIKEKGKKRSEDNFHSGLEALTNQNMSGPYERPFFS

SEQ ID NO: 482 - protein, 618 aa, Flanders hapavirus
MSYLIVKVVILFLVGIDKQVLSWTHDSGRSFVRQYHDPNWFDQTMVYPIECNSTWQEVNTLNLRCPKSLKIDPKNKLNFDLGTVYHPLPSSRYVVNGYICHKQTWISKCEETWYFSTTETNKIENVPITPEDCREAVTIYEMGEYVNPFFPPFYCSWCSTQIDKKTFVIVEPHIVKEDIYNKTFIDPLFLNGYCDQLPCKTIHPDVLWVPQELQKRKDLCNKGTWETGKVFGVLEEKLYQNGYLKDNRFGIDEQWIRSSIYGLRSLVGSCYRGVCRQFGIRFKTGEWWGLEGKDVTGWIKQIIPRCQENQYVSFHHDNSDENIAEAQLVARELVCEEFLGRAKGGDLISPFDLNYLLPLNPGLGPSYRAFKRILKKDSHGGSSPQFRLEKRDCIYSVVHNVTEKVNITNNKLAIGQLFDGSYVYINESEFSRPDYLNNSDNASRDGWFLLSLNGMIKYGNSVYLPHGVSTGLSGIQDIVERGTLMLLDHPKSIAISNQMDLAKNIYTSYFQMNTTSIGSKIENMIIRAKNAVSSYFSQLTNIAWWIGTGILGLLGFIVIKRFHLIQLICGKKHRNGKIKKKNNKLNNDDQEAHVYDTISNTPKTPPHGKGTGVKYFDY

SEQ ID NO: 483 - protein, 601 aa, Gray Lodge hapavirus
MWSDFIIFLNLLVEIIGLGLRTSHRAYVRTLYNDSDHDNALTIPTKFLDPKWTPVTALDIICPTEKQLMPEFRISTELGTVRHPHTQVEDNVDGFFCHKQEWTSTCTETWYFSSTEETKISNLEISEGECEEAITLYVAGEKIEPFFPPFICSWASTQSNSKIFVVVTPHSARVDIYENVYRDPSFPGGECRTKVCKTVNKDIMWIMRGDEKRADTCDVKKWEEGPLYFSIETRDSDWSSISTFSIDESWVRSPLYGIRKLKGSCRTPICGSPGIRFSSGEWWGLKFSEDMLWIQKLPRCAGSKVSFHHDNHPGRELEEEAVVQKLKCKEVIGRILAKDNVTPVELASFVPKNPGVGLAYRLFMTRKDERIGLREYRLEKRRAMYHLVHNITRKLEIGDSKLKVGHWYDGVPVYWNTTEILGENTTKKDEIFLTFNGLVKFHGDLYLPESSAIGGSKLVEMNRPGVLLLEEQTFDKISVKNQFELLDHVYKFEFKKNNTNLIQKISSALESAGQFIGTYFSKISDIVWWIGGGIIGLLITGICIKCNCYKFLYKRKEKNTEPKGQELKPMTAPSKVSDNVYATIDPPSVERRKGSSVFSHY

SEQ ID NO: 484 - protein, 619 aa, Hart Park hapavirus
MSYLIVRILIVFLSYKRLQVFCWTHDSGRVFTRRYHDPNWFDQTMVYPIGCNSSWQEVNKLNLKCPRSLKIDPKNKLNFDLGTVYHPLPSSRYVVNGYICHKQNWISKCEETWYFSTTETNKIENVPITEEDCREAVTIYEMGEYVNPFFPPFYCSWYSTQVDQKTFVIVEPHIVKEDIYNRTFLDPLFLNGYCNQVPCKTIHPDVLWVPQEAQKRKGLCNKGSWESGQAFGVLEENTYTENGGTGRTFGLDEQWIRSSIYGIRSLVGSCYRGVCHQFGIRFKTGEWWGLEGKDLVQWIQKIIPRCDYKQYVSFHHDNSDENVAEAQLVARELMCEEFIGRAKGGDPISPIDLNYLLPLNPGIGPAYRAFKRILKRDSHGGTSPEFRLEKRDCIYSTLHNVSDNVNITNGKLQIGQLFDGTYVYINQSEFERPDYLNKSDNVSRDGWFLLSVNGMIKYGQSVYLPHGVSTGLSGIQDIVERGTLMLLDHPKSIAIANQMELAKNIYTSYFQMNTTSIGTQIENMIVKAKNAVSSYFSQLTNIAWWVGTGILGLIGFILIRRFNVLQLLRGKKNKSKKEVTQRNRRLSSVGSGIHIYDTISNTPKTPPHGKGNGVKYFEY

SEQ ID NO: 485 - protein, 623 aa, Holmes hapavirus
MSFLIAIIILFINIDKLHCYVVQSNFGGIRESKVNILGNVIPYSTTFKHEVLKKQWDYRHDKGHRTVLPTNCHSSWNTVSPATMKCPRRKIIGKDGLYNTYIGDFWHPHSDKGSEVKGFICQKTRWISTCIETWYFSTTKETQIDEIPTFKEDCLAAITLVDSGEYIEPFFPPHVCSWASTNKNAKDFVTVHEHSVVLDIYENSLLDPIFLSGKCKDRVCHTIHKDVLWVEATDNERDDFCVATAWEFSHVFADIDIDHDKNNPIYSIGETIDSEIYGPRSLEDACIIKVCGIPGIRFSHGEWWGIRSLSNRIPMEDFMYKCHNGTNVGFVHNIWTPSELIGEITYRDHKCLDVLSSFLGRRKINPYELSYLVQDFPGEGPAYRIMKQYTGKDKTKATFTLQTKTCRYHVVYIDKLTFSPINESDEVYELGIWGNGRKVILNSTEVGINPTYVNPSKDWELLETFNGLMRFGSDLVLPQAVYTDHPNITSLLEDYEISLIGHPKEILIQDQDELSEVYKFHARSNSTNVVSLAENFVKGIGKSIGNFFGGTKNLIWWLVTIILSTLGTYIAYKLGLFNFLKKILVQDADDKPSNRMSNIYEEPLKLGERKTHLVKNPFFDNGI

SEQ ID NO: 486 - protein, 665 aa, Joinjakaka hapavirus
MILIRWFLWISLSLLLLGINEVDGILWDFRINRLVRNKRKTQKTKLDQIGNGVVIQPIDPKEVHYNIVKPSIQIKNQSHPVIEIDDQKEPELKLEDFDWVSGNEFEGVVNMPVNCLTNWKVINPYAIRCPTFYEHDRYGGGRTVIGTAVHPEEIEHNIIPGFMCQKQTWVTECTEAWYWSTTVKNYVESSPVVEMECLMALAKEKVGTYVDPFFPPAECAWNANSRSSKEFVTLHPHDVRFDFYQYSKVDPLFVGGKCNEKSCPTIHQHVIWIGKNPVPLEGTCNLDRWRQSDIFALETHTSEKKVSDKVTIYLEFIESATYGMRSTKNACWTRFCDVPGIRFNDGEWWGIKSGHNVALDFLPECGKKSLITLHHAVNQDSEFKNRLSLKHYKCTEVLTKLISGSVITPMDISYLISDRPGLQSYYRFSAKQKGNGPVMGGGNNYMIEQKECMYQFVLLESDRFNITKQSDQINVGMTLQGDHIYINLTDFQHTKGNKSNDINRFTMTVNGYLKTGNVLVLPVDEITSESVDNTLYTPIGYHLIEEEEIGNYTTIGDAIEKILILDPRLNRTDIVEETVHFVNNIGKTVSSFFQGTSSLLWWGVTSVFFLVIVLLMRKCGVIDWLLKKKKPKSVERMNKYNSESNRMVDNKTSHGNVNGGFFGNV

SEQ ID NO: 487 - protein, 611 aa, Kamese hapavirus
MSYLLVIILITINRLYAFSRDADHWYVRVPHDQSWFDNVITFPIDCKEPWQQITSQNLNCPSFNNISAEAKASFNLGTVFHPLASSRLTVDGYLCHKQSWISQCVETWYFSTTETNTISNLPITKSECEEAITMYEMGEYTNPFFPPFYCSWCSTQTDQKTFVIVEPHSVREDVYNGTFVDPLFVDGYCSADYCRTIHPDVLWVPRGQSMRKDVCNKGLWESGTVFGVLEERDEDLYYSIEEQLIRSSIYGVRRLEGACYRGVCNQFGIRFQSGEWWGLAGRDVVIWITRILKQCARGQRISLSHDNHDERMAETQELMRTMLCENVKSRILSNDPVSPNDLNYLLPTNPGVGMAYRIFKRILLKGNHGGPTSELYMEQRHCMYRILHNVSRVINQTSGTWIIGQMFNGAPISINESVFERPSYLNNSARESRDGWFLLSYNGLIKYGNVLYTPSAVESSVEGLGFFHDRTSLLLLDSPKSVAVSSQMELVNNIYTSIFHSNTTSVFSKVEGAIRAAKNAVASYFSQLTNVAWWVGTGCIGIVVLLIWRKCHCYDLLCKKTSRSSDEISSKHIYDTIEMKPRTRVQNKASTPKLPPKRAHGKGLAHNYFQY

SEQ ID NO: 488 - protein, 612 aa, La Joya hapavirus
MELIKIHLMLISFFTSSAGLERGSVGSISLISTEKLNLSTSHHDKGIFQNREKPLGHEVVLPVHCTGEWVEKPAMSLACPKRKINGPDGYYDEYFAKMWHPPTHASPEVKGYLCQKTTWNAKCEETWYFSTSKSTTIDETPINEDDCRAALILYKTGELLEPFFPPFSCYWNNININSKTFVTIHEHPTVLDLYKDTKKDPIFLHGECDGEVCETVHSNVLWVEAPLEERDDFCDPALWESSNVYTEKGGPQIPIVLESDVYGPRYTQGMCWMRICGVWGFRFSSGEWWGFRMVNKDFQGLWYTGKIPSCYGDFEVSFAHEAIAMTQLLENLSYKDHKCVDVLSTLRGNKVINAYELSYLVPEHPGFGPAYRILMVKNKRNVTQPVFILQTKNCRYQRAYLTNLSFTITGEETSESVKVGVWGDNQPVYLNWTEIGVNSTYKPNITGNWHQLMTFNGLMRFDKTLLFPQSVFVDAPNVSLLLDGFQLDLIEHPHQYFGRDEKTPSSLYKFYPHGNSTNVGEVIEGWFKSAKNAIGSLFSGMSSLMWWIISTVLSLITLLVCYRCGLLSLVKRMFTKRTRPSKKGRTSRSSHRMEHIYTEPNNPSSSSNPFFA

SEQ ID NO: 489 - protein, 620 aa, Landjia hapavirus
MDKIIIFLVMLVKMTHGNIQPIIISSLPVVSGILRFSTRSDIVRQSVDDGFMDNTIIFPTQCGQWGPVRPEDLRCPTPQQSSPEDRLVFEMGAVYHPNPSNNYIVNGHLCLKQRWSSICQETWYFSTTESNKIDDLPITDAECQAAIVAFKSGENLSPFFPPFYCSWASTQTNSKDFIIIEQHNVQESIYNMTFLDPLFLNGVCNQPICKTIHPELIWVMENEKNRWDLCNIRNWEAGTLHSAIETKDDSMSGPYSIDKHWIRSSIYGIRRLQGSCLMGVCNKYGIRFASGEWWGLDNKEILKWAYRNFKVCGKGTRVSFHHDNHDERVLEDQYVARSVMCSEIIGRILVNEHVSPMDLSLLIPSNPGKGRAYKIYKRVLNKGHHGGIEIEYRMEKADCTYHILHNTTRSLTIEGQEITIGEWFNGELMKLNVSTNFSVPQYIKNDTTNQSRDGWFFYSLNGYTKFSDKVYSPDYMLSGPVGVFNYSQKGQLFLDTDPQILRAKDQMDLYKKVYLSEYHTNSTSIGEQITHIISRAKNAITSYFSQFTSVMWWIVTGVLSLIAIILIKRFGVVSKIKKIAFKNNNKSNNKKSSQTKTVHIYETITPKVAHGKEGNYADFM

SEQ ID NO: 490 - protein, 633 aa, Manitoba hapavirus
MVTKKIMMITMLFKSNVFCLILPLLPVANSLLRTQNWQFVPLKTDPKYIDNTIVFPTKCGDWKQSNKLDLTCPTSEQAAPENRLITEIGNVYHPSPSNGFVVTGHLCLKQKWISKCEETWYFSSTETNHIEDLAITESECKEAVTAHKAGENLSPFFPPFYCSWASTQINSKIFILVDEHKVLENIYNRSLVDPLFVGGNCQGDVCKTIHPETMWIVENDQVRSDICNEKNWELGTLHSAIDTDDDYNKGQYSIDLHWIRSSLYGIRKLDGSCRRRVCGVPGIRFSNGEWWGIKDPKALILSHNLLSECPVGTKVSFHHDNHDENVLEEQYVTRRMMCAEIVGKIMVGETVSPMDLSLLIPTNPGRGKAYKLYKRAIYKNTHGILDVEYALFQSTCYYHLLHNSSKIYNITENEELTIGYWFDRKEYKMNISQNFSVPDVLKKNHNVSRDGWYFYSFNGYTKYSGKLFSPSSVLEGFVGMLDYTQRGKLAVADIPPQNVIKNTVDLFKNVYTSDYRVNSTSIGEQISIFVKNAKNSVVHYFSQLTNVMWWIGTGLISFLIIMLFRRFGLFGKVTNLMRKKGRKNAEHAPRELKKINTQSHKRSNSASTSQNVYETIKDRQTAHGKESGFFDFV

SEQ ID NO: 491 - protein, 575 aa, Marco hapavirus
MLKLKQLLTLVIMICGFGISRLLNNLIHRSPNVSYSHPPKKLSAMSLLLVFIILNLNLNSVSPASHEVLFPTMCESQWKDLSIRDINCEESSILESSDFAYANPIVSKIPRSPNFPKANGYLCSGQIWSIKCEETWYWSTSIVRTIDTQIISSVECLAAIKSYKEGTLIEPFFDEPNCAWNSINALERKHIIVHEHPVNIDPYEDLYLDPLFLGIGCQKSPCDTIHKDLIWITDEPNNLPCTTDMWMTDIYKVSQDKLLVKSEAMGIRSLKGSCIMKLCNHPGIRFSSGEWWGTYYNHPQQADKIPNCNPNEKISLSHRSTITEKLIVESDLSEYSCYQSLSKIYNKELISLLDFYYIVNKSSGEKMAKRLIQHKHDRRYKIQGRLCHYRFITPQSNPNIQKNPNGLLQIGIDHNSFPVKINVSSYFDVNDPTLNWTVVSMDGITYSPAGLKFPYHENILDLLETILDKPDNLALLNRPEKTIPRLEGGTNNLLKSSTHSNSTNLMTSTLNELSSLGSLISGWFDMTWVRTLIGLVIAFIIIIICFRVFKCFIPNFGHKTHTAISEHASRDNLFP

SEQ ID NO: 492 - protein, 602 aa, Mosqueiro hapavirus
MFPLSTVLLPMLFSHVQSWTHDVGRDYIHRPHNPDWFDNVISFPTECYTDWTLVRAHEIKCPSLSSINLDDKLSFKLGTVMHPLPNNKYTVDGYICHKQQWISKCEETWYFSTTETNSIENLPIGATECMEAITVYESGEYNNPFFPPFYCSWCSTQIDQKTFIVIEEHTAQENIYNASYIDPMFVGGKCSSNLCKTIHPDVLWVAKREEIRRDACNRKTWETGDVYGLVEEKKFDNDQRDFGIGEQWIRSSIYGVRRLDGSCYSKICGQFGIRFNTGEWWGLDGQGVKIWLRKILKPCQGGLRISFHHDNHDETMAIAHSVAREVTCEEVTGRILNQGFISAFDLAYLNPLNPGRGNVYRVFKRVIKGRHADEQYEYKMEKKYCMYRTLHNVSDVINQTRGKFLLGYFFDGSPFYLNQSDFEGAGKYGNERNTSRDGWFLLTYAGLTKFQQTLYTNEGVSNSQAALRNLHDPGRLALAEETEIPNVRDQMDLANKVYNSWFKMNTTSVGERITTFINNAKSAVSNYFSQLTNVIWWVGTGAIGLIVVILGRRFYRYRKSSKPPALPKRLDSVETQSTHIYEPVRSPQPVARGNQGHPFFSF

SEQ ID NO: 493 - protein, 611 aa, Mossuril hapavirus
MSYLLVIILIQVPRLFAIFRDTDQWYVRLPHDKTWFDNILTFPIHCKEPWQPITSQNLNCPSFNNISVEAKASFKIGTVHHPLTSSRLTVDGYLCHKQSWVSQCVETWYFSTTETNTISNLPITRDECEEAITTYEMGEYTNPFFPPFYCSWCSTQTDQKTFVIVEPHSVREDVYNGTFVDPLFIGGSCRLDYCNTIHPNVLWVPRGISMRKDVCNQKLWESGTVFGVLEEKEGDMHYGIEEQMIRSSIYGVRRLEGACYRGVCGRFGIRFPSGEWWGLSGNEVVRWVLRILKRCEKGERVSLSHDNHDERMAETQELMRTMMCENVRSRILSNDPISPNDLNYLLPVNPGIGQTYRVFKRILTRGDHGGPQSELYMEQRPCMYRIIHNVSKIINQTSGSWIIGQLFDGTPVQLNNSIFDRPNYLNQSDGRSRDGWYVLSYNGLIKYRTTLYTPSAVENGAEGLGFFKDRTNLLLLDSPRTVAISNQMELVNNIYTSIFHSNTTSVFSKVESAIRAAKNAVASYFSQLTNIAWWVGTGCIGIIALLIWKRCHCYNLLCKKTSQPAGENSSFHVYDTIEMRPRKTVSTKNHPPKPPPKKAHGKSQGHSYFQY

SEQ ID NO: 494 - protein, 623 aa, Ord River hapavirus
MFWIKFLVFIRASLITTKGYILPGGVGGVRSSKVHILGEIVPYTSSIDHGVLGTKWDFRHNDGHRTVLPTHCHRTWKDVLIGNIRCPSRKVIGKEGLYNTYIGDVWHPHTDSGSEIKGFLCQKTRWVSTCTETWYFSTTKETQIDEIPISKDDCLAAITLVDSGEYIEPFFPPHVCSWASTNKNTKDFVTVHNHPVLIDIYKNQLMDPIFISGKCSDKVCKTIHKNVIWIEANDNERSDLCVASAWEFSHVFADIDIDHNEPGIVNDIGDSIDSELYGPRSLKGACIIEICGITGIRFAHGEWWGLKTVSNKISFTHGLYHCPANSSVGFVHNIWTPSEVVGEITYREQKCLDVMSSLLGHQKINPYELSYLIQDYPGEGPAYRIMKQFTGKNRTKSTVRLQMKMCRYHVAYIKNVSFLPTDESHEIYEIGTWGNGNKIILNSSEVGIDPSYNGSDNDWELLLTFNGLMRFGKELVLPQAVFTDHPNVSNILEDYEINLIGHPKEIFQEIQDELSQVYKFYERSNSTNIVQLAGNVVKSIGKSIGNFFGGTRNLMWWLVTIVLSTLGTFIAYKLGLFNFIKRMILSDTLKKEEKRLSNIYEEPLKLGERKANLVRNPFFDHGI

SEQ ID NO: 495 - protein, 630 aa, Parry Creek hapavirus
MSNNKMFKPMIIFALILCLIINVSSYIYSGSVGGYRPKKVRTYGEVIPYTEIVEHRNLYQNWNGKHRTGHRTVLPTHCHTEWKDVTHGSIKCPHRKVIGTDGIYNTYIGDVWHPHTDSGSEIKGFLCQKTRWVSTCIETWYFSTTKETKIEEVVINPEDCLASITLMDSGEYIEPFFPPHVCSWAATNENAKEFVTVHSHPVVVDIYKNEMIDPIFLSGKCKEKVCHTIHKNVIWIEANDNERSDICVASAWESSHVFADLDIEPDIRAQKVEYIGESIDSEIYGPRSLKGACLIKICGIWGIRFSHGEWWGLKTLSNKISFADGLYNCGSNTSVGFIHNIWTPSGLIGEITYRDHKCLDVVSSLLGHQKINPYELSYLIQDFPGEGPAYRIMKQMTGLNRTKSSFKMQMKTCRYHTAYITNVTFQPIDSTQEVYKLGIWGSGHRIILNSTEIGINPTYTNSGSDWELLLTFNGLMRFGSELVLPHAVFSDHPNTSDLLEDYEINLIGHPKEIFQSDQDELAQIYKFYRRANSTNVVSLASNFLKDIGKSIGNFFGGTKNLIWWIVTLALSTLGTFIAYKLGLFKCLKRMILETDNESGNKRISNVYEEPLQLGERGHKPVKNPFFDHGI

SEQ ID NO: 496 - protein, 623 aa, Wongabel hapavirus
MSFLLAIIIFFFRTQDSNGYVVQSGIGGIRESKVNILGQVVPYSTKFKHSVLKSQWDYRHDKGHRTVLPTNCHATWNDITPSNMRCPRRKIIGKDGLYNTYIGDFWHPHTDKGSEVKGFICQKTKWVSTCIETWYFSTTKETQIDEVPITKEDCLAAITLVDSGEYIEPFFPPHVCSWASTNKNSKEFVTVHEHSVVLDIYENKLMDPIFLAGKCFDKVCKTIHRNVLWVEANDNERDDFCVATAWEYSHVFADIDIDHNNNHPIYSIGKTIDSEIYGPRDLADACIIKICGIPGIRFSHGEWWGIKTLSDRIPLEDIIIKCHNGTSVGFVHNIWTPSELVGEITYRDHKCLDVLSSFLGQRKINPYELSYLVQDFPGEGPAYRIMKQYTGNNKTKATFRLQTKTCRYHVAYIDKLTFDPENGTDEVYKLGTWGNGRTVILNSTEVGINPTYINKSFDWEPLETFNGLMRFGAELVLPQAVYTDHPNITNLLEDYEISLIGHPKEIFEPEQDELSQVYKFYERSNSTNVVGLASNFVKTIGRSIGNFFGGTKNLIWWLVTVALSTIGTYIAYKLGLFKFLGRILFQGSESKEDKRVSNIYEEPLKLGGRRSHLVKNPFFDNGI

SEQ ID NO: 497 - protein, 543 aa, Barur ledantevirus
MDFWMLICVLAAVAQARHDYSYEGKTKDIIGLIPNDKKLHWKTTKLDAIRCPEMGLVSNKGEQVVERWIIERPRTTGELKNKGKLCHLAKWVTKCEYTWYFSKTVSRTIQNLEAHEADCKQAIQDYNKGILTPDSFPPEACYWASTNEESVTAFTITPHEVTYDPYEDRYLDPLFVHGSCHTDFCETVYESTVWLTDSPGSQSSCKLVGDEPVEILESYRRNKAGDYKFGFWMRGSHIHHMPVSHLCKKEYCGRLGYVNQQGVWFHVTSVKWSYNETISFRHLIDNCPQSSDLVVLDEEFNDDDLVATMEEMMWDINCLNAVENIQKHRRASLHDLYQISQRHPGPGVAYRLKNGHLESAQASFVALYAPEDHVQTRECLGTILDSKHDRCHSWEDWTHIANSTYHAVNGITEVDGKIVFPEFRVLKRRWDLEYSLKHDLKQINHPVIHDITGKVHENIVHKEIKSHSVNAGDLIGNWVTVAESKIGEFFKGFSHSFVTISVFLITVLAIWIIVRCCQMCQRKKPTKINSAKDDIPMVTTSFG

SEQ ID NO: 498 - protein, 548 aa, Bughendera ledantevirus
MKKTTRNNNFINMIKYIIILLSMFRLMGGVTKLSPYRNLLLPINSHSEWKPVNLANLTCPKPKLDWTIDFHQLATEQVYRLRDLSIGEIKGYLCHKAEWITRCEYSWYLSKTVSRRIRELSPSQSECEDGIHYIKEGRETSGSFPPEECYWNSVNDESEVKIILTPHSLTYDPYTDRGLDANLLGGFCKSRYCQTTHSSVMWIQDPESHTEPCTHMIAEKLTVLSSKQGETGKRWVKTTATPAMSLEKACKLRYCGVEGILLASGLWFGLPEESIEGHDNLGVKEVCAASSEVGVLQPDYFDKSLEFKMEDLQREILCLQLLDKIKIQKIVNMFDLQYLRPHSPGFGHVYQVVNGTLMSASAQYAITTYPGEKTISRKCLGQFKDPSLNTLCVNWSSWLPMKDGVYQAFNGIIEKDGVILLPEDQLLEATWSPDMFDYIPLDKIHHPVYINISDIIHDGVDEGLIHDKTENPGDTLSGWVTIAKNKVLIFFETIGESLLIIIMIVILAWILLRLIKLSIMCVKNRGTRNDRYEEDGNYFKNRQLNVFG

SEQ ID NO: 499 - protein, 549 aa, Fikirini ledantevirus
MGFLIVLCLSVALGHLEDRNHTPAPFYEPSDSEKELRMDGEILFPVTVGEVWKPVPLSTLRCPKRAKRGSQFGKTYKVFNLTRYESFKPGSVSGYLCHKIKWVTKCSETWYFAKEVSRHVEPVLPTEDECKMAMKAEQSGLSESGSYPPEECYWNAVNEEVNTEVHLTVHPTGLDPYTMEWVDEIFLKGRCSHDYCETDHSTVTWIRDAEKTNHVRCGDKVVEHAELSLIDGTSSPSKLSDLAVISHHIPLSSLADSCELTFCGEEGIQLANGIWFQTPNLAGLGVDYLSECPSNTKAGMISQDYKEDEIIYDMEEIRQDVECLNTLESIQATGTITYRGLQYFQPRSVGVHPVYRIRNSTVETNTAKYVLAFIPDTEPNSSCIGVITENRRPRCLAWNEWLDEGNGLYQGFNGLMLDKGKILYPIRYLLDADWNPEMHVLRYVTYSPHPLLHEYARQVIDEGRNEVVKDGSKNIGDAVAETAESLSNRLTTFFQKFTSQLSGIVGILAILMISYGIFKIARRVKKAKRPVMVKPQEIEMETSEGEGFG

SEQ ID NO: 500 - protein, 543 aa, Fukuoka ledantevirus
MDFWMIIYVLVVSASAQQDYSYGGKTKDIIGLLPQDKKLHWKTTKLDSIKCPEMGLISNKEEHVVEKWLIERPRTTGKLRNKGKLCHLAKWITKCEYTWYFSKTVSRTIQNLEAHEDDCKQAIREYNQGKLIPGSFPPESCYWASTNEESVIAHIITPHEVTYDPYEDRYLDPLFVHGFCRTSFCETVYESTVWLTDSPGRQSSCKLEGDEPVEVLESYRHNKAGESKFGFWMRGSHIHHMPLSRLCKKEYCGKLGYVNQQGVWFHVTSVQWSYNESISFRHVVENCTESPDLVVLSEEFNDDDLAATLEEMMWDINCLNAVENIQKHKRASLHDLYQISQRHPGPGTAYRLKDGHLESAQANFVALYAPDEHEQNRECLGTVLDHTGDQCHAWDDWTHIANSTYHAVNGITEVDGKIVFPEYRVLKRRWDLEYSLKHDLRQINHPVISDFVGKVHENIVHKEIKSHSVNAGDLIGNWVTVAESKIGEFFKGFSHSFVTISVFLMVVLTIWIIIRCCQMCKREKPTKIISAKDDIPMVTSSFG

SEQ ID NO: 501 - protein, 548 aa, Kanyawara ledantevirus
MKKTTRYYPTTNMHANLVHFTLLVASVQCVTKLSQYRNLLLPINVHSDWKPVEIHNLTCPKPRLDWTVDFHQLATEQVYRLKDLSLGEVKGYLCHKAQWITRCEYRWYLSQVVSRRVKEETPTQAECEEAIHHFNEGREMSGSFPPEACFWNAVNDESETKIILTVHDLTYDPYTDMGLDSNLVGGTCKSRFCKTTHSSVMWIKDPKGQTEPCVHMIAEKLTVLSSKQGETGKRWVKTTATPAMSLEKACKLRYCGVEGILLSSGLWFGLPDSSKEHHDNLGIRDNCPTNSEVGVLQPDYFDNSMEFKLEDLQREILCLQLLDKIKLQRLISMFDLQYLRPHNSGFGHVYQVINQTLMSTHAHYAVTTYPGSNSLTRNCLGQYKDSSMNTVCVNWSSWLPMKNGVYQGFNGIIEKDGVILFPEDQLLESSWNPDMFDYIPLDKIHHPFYFNMSDIIHDDIDERLIHDNSTNPGDAISDWVTVANNKVVHFFKQLGESIVIIILIILGANLTYKCVKLCIRWRFGLKSKKTQFLEEGHAMNMARETVFG

SEQ ID NO: 502 - protein, 563 aa, Kern Canyon ledantevirus
MLITVLLVIIVSSQAQIHYSGTPKPGKGYVKEDSPKLKYNDVELYHQPPLVLPLENDREWRAANLSALFCPSEAPVGPNEHIHIESWIVTRPRQQIKDPVKGYLCHKSRWITKCEYTWYLSKTISRKIEPLPPSKQECEEARRKFEQGSLTHLSFPPAGCYWASTNEESNTDIEISEHPATYDPYKDKLVDPVFVGGECDSKLCDTIHDSTIWIESDRNPRPEQCNMNEEEQLDVVQGIRAVGGTKKNSQHAIWVIGNNYPYLDARGLCKKTYCGKVGALLGNGLWFHVLHVVNGTGGDTVWSTARACSKEEEIGILGEEYEIESLQATMEDIMWDLDCFRTLETIEHHKRVSYFDLFKLARLTPGQGPAYRLIKDHLFMKDVEYVKLRPNKKPTKDCLGLWTDSRHQNQCVKYKDWQKLSNGKEHSMNGIMAFNGLVDLPHDRFHKRNWDKDFILKMDLQTVHHPVLKDFSSKIHDSLQDGLIKNHAANAGDLIGNWVEVASSKFGSFFKEAEKIILSVIIIIIIILIIGMCIKIRKRQNIQYIKQNSDSNPKLEQAELQIF

SEQ ID NO: 503 - protein, 573 aa, Keuraliba ledantevirus
MECIMFWTILALSISFGFSYPIEDQMTIPLKPGIHRTLDGDLDYNDDEHYHSPPLVLPVPNNRSWKPVNLSTLKCPESSHLGPDTHRTLEKWLIFRPKSSILTKIEGVLCHKSRWLTRCQYTWYFSKTISRKIEPIPPTFQECQEAIKLKEEGILENLGFPPPNCYWARTNDEENILIEISEHPMTYDPYLDGVIDSILVGGKCSQKECETVHDSTIWIETQRDTRPSQCDMGTEEQLELVSGLKQIDGNKQKYQHSVFVVGTNYPFMDAKGACKLRFCGKSGMLLSNGLWFNIAHTILPKPEANSNFWSALPDCSSDKQVGVLGEEYEIEKLQATMEDIMWDLDCFRTVDSLAHHKKVSMLDLFRLAKLTPGPGPAYKLIEGTLMMKEVQYVKARRDTKEQANPLCAAYITESTSNQERCIDYSNYDQNGTYKGQVMNGILVTDGVLIFPHERFHLRQWDPEFIIKHDLQQVHHPVIGNFSKKLHDSIHNSLIKDHSANLGDVMGNWVKVAASKVSGFFKEIEKFLIGGLLLVVILLMVGLLCKCKCRRKPKAKNLKANSSGDEMSPNESIF

SEQ ID NO: 504 - protein, 549 aa, Kolente ledantevirus
MILLIILSLLARRAAGTSGGPTPAPLQDPSIVEKSDHLDGTILLPLRLSESWKPISVSSLECPHRAKRTGRFGVRHKVFNLTRFDHFSSGLVEGYLCHKIRWVTSCQKTWYFSATVTRRVEPLLPTEAECREAVNLEQHGILESGSYPPESCYWNSLNEEAVTEIHLTTHNVGLNPYTMEWVDSIFLKGSCKDQICPTEHSTVLWLKDPDQQTHNMCGTEVTEHAELMKRASSGSNISWSDYTLVSHHLPATTMEGACYLDFCGKEGIHLHNGIWFALPDISKLGPETLSRCPEDTKAGSVSPAYAEDDLQFQLKDMKRDIECLNVLETIQATGTISFRSLQYFHPRDVGVHPVYRIINGSLEMATARYAIAHIPLEGNESCIGLVTENTRLKCVGWNDWIPVKENLKQGFNGIMSDHGRIIYPIRYLLGDEWNPEMHALQYVKFMPHPLLHPYSHQIKDKGRSELVMDHSQNVGDVIVNSAGTFFSRIGSFFSQAFDQLIHIAVILGIGLACYVAVKMFLKWKRNREPFKAVERGQKEQEMTELAGFG

SEQ ID NO: 505 - protein, 551 aa, Kumasi ledantevirus
MAGFYLLALTLVCYLTLVESDGTPAPVVKNETGDFLWGLGTELILPVEVISKWVEINPEDMRCPSDPVTDHVIGAIVGHTRFSRYSGFHKATQKGFLCHKMRWITACTTTWYFSHDVQRRVEAQEPGTQECLDQVKKRGEGTEEEGSYPPSQCAWNSVNEEAEVVIHLTVHEVRVDPYTMELLDPVFPSGRCNTTACDTVHQSVLWIEDPSKTRPSCGDRVVDEGNIIRSGWTDNVPGAYYLISQHLPPTKIDGACRLSFCGESGLLFENGIWTHDIKLETVVANQTFQNCQADRRAGAVGPTYEIDKLRFDWEAAKEKIKCLDMIEIISATGALSFRRLHHFNPRTPGIHPVYRIVNKTLQMAKAHYVVTNNPMSHKGTRDCLGTYMDHDTRKCVAWHHWVDVGNGTEQGPNGLLVTGDKVSYPHWFIREKTWDPALHIINYLQNADHPIVSHLGRYIDNASRDSLRKDRSENVGDAASAAVTKLAGSIGGVFKDVWHVITTCVTVGVIIIIILIFRRMIGVFWRGREKHPLPKTPNNIYQETHELKSFG

SEQ ID NO: 506 - protein, 573 aa, Le Dantec ledantevirus
MWIITALICSFSINPTCLYPHGHEDSPTVRHGISRVLSGDAERNDDEHYHSPPLVLPLQNERTWKPANLSSLKCPEASHLGPDEHRVMEKWLVHRPKSSVLTKVEGSLCHKSRWLTRCEYTWYFSKTVSRKIEPMPPTKQECEEAIKRKEEGLLESLGFPPPACYWARTNDEENVQVDVTDHPMTYDPYSDGVVDNILVGGKCNQRECETVHDSTIWLETQKEKRPSQCEMDVEEQLELVSGIKRVGGSKSKAQRSVFVVGTNYPFMDATGACRLKYCSKSGMLLSNGLWFHITRKISPESNENSKFWLTLSDCSSDKQVGVLGEEYEIGKLQATMEDIMWDLDCFRTLEDLSHHKKVSMLDLFRLSRLTPGTGPAYKLVKGNLMVKEVQYVKAQRDQGELANPLCVAFMTESKNADRCIRYDEYDKEGPYKGQVMNGILINEGMVVFPHERFHLRQWDPEFIIKHEIKQVHHPVLGNYSSQIHDSLHESLIKDHSANLGDVMGNWVQVATSKFSWFFKEIEKFIIGGALLLIFILIALMVCRGGCCKVRRKAGGEKGGDSSGDEMNVSESIF

SEQ ID NO: 507 - protein, 534 aa, Mount Elgon bat ledantevirus
MKFLIVSILYILKISTNASKERKLILPLDHHLDWKPAHFDKLTCPKPELDWSEEYKPINVISVLRPPNHKIGGVSGYLCHKVEWITRCDYKWYLSKTVSRRIKEETPTEAECRDAVILHKNGRETSGSFPPEECYWNSVNDESDIKVSVTAHDIGYDPYLNVGVDSLLVGGYCNNSICLTTHSSVIWIRDQVSKPCEGMRLETMTVYTSLYGYTNDKWVGTPSMKMSSLNDACRLSFCGVQGTLLTNGLWFHHNVREGPGSQIQITRNCPPNSEVGVVQPDFEIKLMDYKLADLQREMFCLQTLDRIRLQQVVTLNDLQYLRPHRAGAGPVFRIRNNTLETTHGTYIEASMVGTTQVNRNCLATYLGEDKKPKCIGWKSWHKMNNHKYQGLNGVLEINGLIKFPEDQLLDAEWEADMFEYFKLDKIHHPFLSNISSIIHDDTDESLIHDKTVNPGDAINNWVEVAENRVSTFFKTTGGEIIKIVYIITLIGIIYLLYKIITMCCKMKRTGKKNRRLTSDLIDLDLKPMNSSVFG

SEQ ID NO: 508 - protein, 541 aa, Nkolbisson ledantevirus
MQLSLLMVMASLAQSVTGRAAGRELHDVIGFVPDTDTLQWKPANLDTLRCPEAADPGPDDGAVVEKWVISRPRVNTFLGIKGYLCHYAKWVTRCEYTWYLSKTISRSIQPLDVTESGCQDAFKEYDAGRLVPGSFPPEACYWASTNDETVHAYTITPHEVIYDPYSNAKLDHIFLHGSCNKDFCETSHDSTMWIAKRKGEGSVCQFVGREDVEIIEGAKFSLRKFQTKVWLRGPSLHNIPLDKLCKIDFCGKTGYRNQQGIWFSIDRVSWSKNHSLPIRQKAVGCKPGENVAVVDTNLPDSDLEATIEEMMWDMNCLNALETIQHHKKVSLHDLYQIAPQKSGPGLAYRLNDGHLEVAQAHYWSVQHPKRGKLSRTCLGARQADETSSCVKWNKWTHVANNTYHAVNGITEVDGQILFPKRRVLHRKYDPEYATRQSLRFIKHPVIDKFEDKATENIEHKDIISKDVNAGDLVGNWVVVAEGKLSEWFGGLGKSIISVVSLIVGLLVLYVIVKLCLYFRPKAKEKIGDMEMKLKKRSESFG

SEQ ID NO: 509 - protein, 551 aa, Oita ledantevirus
MDIVRFFFFVGATANAKVEDTTRAPLHEPHELGMMLSDIPTVILPVSVGEYWREASLKELRCPLSNLDEGPDGRTVAAFNMTRYDHFNPALANGYLCHKTKWITRCEYTWYFSKTVTRRIVPVLPSHHECHEERQREISGIPHEGSYPPEECYWNSVNEEVEETILLTEHSAGYDPYTEEFVDEIFLKGRCHEEDCLTDHSTVRWIHSEMKGNKPKCGEKLVEEAELISLNPNRDDQDFSKLYIYSHHIPKSPLKNSCLLNFCGEEGIQLENGFWFRTPDWKKGKGISIPYCSEGTTAKALGDGFTRAYIRFELDELRDDMACLDALESIQVTGAISYRKLHYFHPRKSGIHPIYRMRNGTLESNTAKYVTAYAIGNEKGCLGMVKNQSDMICIQWNDWIEVEKDLLQGFNGLMRDKGRLMLPWKYASDERWNPEIHKVQFLTQAQHPFYSHISHMIQDDIIDEIRKDKSKNVGDSVVKAAESLWERFSNFFHKVKEVAFGAGILITTLVLVLLIKKCITLRRVKSTKRKKKAGRPMVEELEMTESDASFG

SEQ ID NO: 510 - protein, 568 aa, Vaprio ledantevirus
MCSLRSKIAAISVLIGLHAVLGEPRNFTGGRSIVLEGTRKPNYDEHYHSPPLILPLQNDRDWKPANLSSIRCPDPAHLGPDEHRTMETWIVARPRETIKTQISGVLCHKARWVTRCEYTWYFSKTVSRKIEPLPPKESDCKEAIKKKEEGLLESKGFPPAACYWASTNDEAYEQVEITDHPATYDPYVDGVLDSIFVGGRCKSKICETVHDSTLWIESTRATRPAACTMHEEEQLELISGIKEAGGSKTWMQYSVFVVGTNYPFMDAKGSCKLKYCGKNGLLLSNGLWFHILHTVRTEGEAVAGFWDSLPDCTPNREVGVLGEEYEIEVLEATIEDIMWDLDCFRTVEDLQHHKRVSLLDLFRLSRLTPGIGPAYTIKGKTLFTKDVEYVKANKIKDADSTPKCAAHFLKTNAGQRCVEYTEYDKNGPRKGHVMNGIMIVDGKVKFPHDRFHLRNWHPDFILKHEISMVHHPVIGNISSKIHDSIDENLVKEKDANAGDMIGGWVKIASSKISWFFKEIEKFVLAFVILIIFLLLISVLFKIRKRNKTDSKNEKRATERLKKIEESVF

SEQ ID NO: 511 - protein, 546 aa, Wuhan ledantevirus
MIAFLILIACANGYINDNDTEYVWRARPLGSVADKGVLYVPLDHSKNWRPAKYQDLKCPKPQGDWQLKFIIHTRWVTWRPDDISLDHIPGFLCHKAEWITRCEYTWYLSKTVSRKLKEETPSESECQDAVRLYEAGKQEAGSFPPEECYWNSVNDESVVKTIVVEHSIAYDPYKDCGVDEALVGGSCKKKFCDTKYSSVKWVQDVDHESQRCHNIIQEQLEILKRNDNKEQDKSWVRSKSFPITEMDDACKMSFCGLDGIRLKNGIWFGFQKSRTDHSDMGDIPQCVSGTEIGIPDKNYKEKEFEYELEDLQREILCLNVLDKLQLNQVISLYDLQYLRQDAPGYGNIFRVNNGTLEVTTGKYIKVYHAKNDLSPDCIGTYKDHSGDDVCVDWDEWLPIEKDKDQGFNGIIRIKNKIIFPDDQLRASEWREELFDYFKVDKIHHPFLNNVTDVIHDDTDDENLIHDKTVNPGDAINNWVKVAENKVVNFFKELGIGIIIIVWIIAGIIFLFILFKLIRFCIKLRYKKVNTGDKEIEMRHYDSPIFG

SEQ ID NO: 512 - protein, 535 aa, Yongjia ledantevirus
MTGLLMLALALTLCHGLNIYQEGGVLLPLSEDITWRHVKLDQVQCPFKGDQGPDEGQILEKWTVGRPRQRHDLKLNGYLCHKARWTTRCVYTWYFSKTVSRQIENLKVSDQDCASALKQQQEGQLPTGSFPPESCYWATTNDETVEAVTVTPHPVHYDPYTNEAVDTLFPNGRCGNLLCPTVYDSTVWMQGQNDLLEICSFKEDEPLEVVEGVKISGGMGINVDLWITGPHLPHEKLLGICHKNFCGKSGLLTLSGTWFYLQQIVYKKNNSLDVLKRVPECNSTRLVGVLDEMEPYLQMRATLEEITWDMNCLATVDSIHHHNRASPHDLFQISPTHPGTGPIYRITKGGLEMGTAEYVVAEPERRPTRQCLGRYSTNTGKQCVGWKGWTQMENSTFHAFNGITERNGQIKLPKDRMATRDWGEEYIKKHPLSFYHHPSLGNLTRKITENILHKVIKSHNVNAGDLIGNWVTVVEDKVSSFFSHLGGSVVGLLSVILVVGVIYMLIQIIHKIRTPRPQFHSRDMELQKPTHSVFG

SEQ ID NO: 513 - protein, 524 aa, Lonestar lostrhavirus
MIRIQPGLAILIVFTISPILSSRHSVIMFPHVVTPWIRAKTSDLSCPPSSPLETPNALPITEIDVFIQKDHKELELIPGLLCYGLKYVTHCSEGFFGQKTISKRIDKIAPTLTDCRKSYEIYEKGEQIDPYFPASKCTWMAEDEDSKNFYLLTPHSVKYDPYTTGATDPLFLRDHCKETTCETVHANTIWMTTKSINRCSPFQRHVGTLYHDPRKNVTHIQYKGTHTYSLNGSCLMNYCDKFGVRLSNGLFLGGPLATKIPNGPKCPQGTTVKFVPIEDEIETLEEEIQEDRDRETCLVQLMTVRMSNFSTFFSLSYMDPKFESRGKVFRIHQNHLEMAHADWIPVTNVTNHKQNLIGISNRGKELYFTDWVPSGRHNLSSGWNGVHKTSKGKIIIPRLSLLKQEYEETLLVEHNLREITPVHIHHFDKEGLNDTVVTLTSHELVDVGAWIGSVWSTLWGKITTIVTVIIALIILYFIVRCCVPILSRCCKKKESKHPEFEMVPLRSPSSTPSRVTLTRPKGWQ

SEQ ID NO: 514 - protein, 526 aa, Aravan lyssavirus; identical to SEQ ID NO: 164

SEQ ID NO: 515 - protein, 525 aa, Australian bat lyssavirus; identical to SEQ ID NO: 173

SEQ ID NO: 516 - protein, 524 aa, Bokeloh bat lyssavirus
MPTQAVLTAFLTTITVCVGKFPIYTIPDKLGPWSPIDINHLSCPNNLVVEDEGCTNLSGFTYMELKVGYITTIKVSGFTCTGVVTEAETYTNFVGYVTTTFKRKHFRPRPDACREAYDWKTAGDPRYEESLHNPYPDSHWLRTVSTTKESFLIIEPSVADMDAYDKSLYSKIFPDGKCSGVSAVSPFCPTNHEYTIWMSENPKPGMSCDIFTTSKGKKAMKNGKMCGFVDERGLYKSLKGACKLKLCGVSGLRLMDGSWVSVQNPEDAKWCSPDQLVNIHDFHSDEVEHLIVEELVKKREECLDALESIMTTKSVSFRRLSHLRKLVPGFGKAYTIINKTLMEADAHYKSIRQWTEIIPSKGCLMAGGRCYPHHNGVFFNGIILSPDGHVLIPEMQSALLQQHIELLESSVIPLMHPLADPSNALKGGDGAEDFVEVHLPDVQKQISGIDLGLPEWKRYFLMGVSALALLALIIILATCCKRIKRKKKMKSSPVELIRKVSVTSQSGRVVPSWESYKVDAGGHA

SEQ ID NO: 517 - protein, 533 aa, Duvenhage lyssavirus; identical to SEQ ID NO: 151

SEQ ID NO: 518 - protein, 524 aa, European bat 1 lyssavirus; identical to SEQ ID NO: 149

SEQ ID NO: 519 - protein, 524 aa, European bat 2 lyssavirus; identical to SEQ ID NO: 153

SEQ ID NO: 520 - protein, 526 aa, Gannoruwa bat lyssavirus
MVHKAFLLILLLVSPPCLGKFPIYTIPDKLGPWSPIDIHHLSCPNNLIVEDEGCTSLSGFSYMELKVGYITTIKVSGFTCTGVVTEAETYTNFVGYVTTTFKRKHFRPTPDGCRNAYNWKTAGDPRYEESLHNPYPDYHWLRTVTTTKESLLIISPSVVDMDPYDKSLHSKVFPTGRCSGISVSSTSCSTNHDYTLWLPEDPKPGSSCDIFTTSKGKKASKGGKICGFVDERGLYKSLKGSCKLKLCGISGLRLMDGSWVSIQNPEDTKWCSSDQLVSIHDFHSDEIEHLVVEELVKKREECLDALESIVTTKSVSFRRLSHLRKLVPGFGKAYTIVNKTLMEADAHYKSVRAWNEIIPSKGCLKVGERCYPPFNGVFFNGIILGPDGHVLIPEMQSSLLQQHMELLESSMIPLMHPLADPSTVFRGDDEAEDFVEVHLPDVQKQISGVDLGLSEWERYLLIGVAALGLFAFAIILAVCCRRGRRRKRTPSDPMEMIRKVSVTSQSGKMVPSWESYKNGNGSRLGV

SEQ ID NO: 521 - protein, 524 aa, Ikoma lyssavirus
MAQLVTLVLNGLSLLTGPGIFPMYTIPEGLGPWTPIDLSHLKCPDNTYFAEEGCNEGSKVSYLELKPSFHSQNKVQGFTCTGIINMATTYTNFVGYVTTTFQRSHFIPNQRDCRQAREWKKEGDPRYEESLTTPYPDSKWLRTVTTSKESWLILDPAVVEMDIYNKTMFSPVLRNGYCNFSPENPDFCETNHQHSIWIPEDEGRGITCDIFQASTGILLKNGSKVCGFQDERGLFRSIKGACKMIICGKSGVRLYDGTWVSYNSVDNLRMCSRSKMVNKHTVKLDNIEESIVRDLIKKREECLDALEEVMLTRSISFRKLSLFRKQVPGRGYVYTMINNTMMEATGHYKSVDNWTDILPNPICLMVDGKCHPGYDGVLFNGIIRDSRGKILIPEMQSHLLRDHLELLKRNSIPWRHPLVHYSENGEDGSDLTSFAQLYIKDPHLSVSDIDIGFPSWKKYLMIVGGVLIGLIVFWFLVKLLFRVCYTVKRKRLREGSMNETSSGPVIRTSGDKQLSWESYKSSAF

SEQ ID NO: 522 - protein, 524 aa, Irkut lyssavirus; identical to SEQ ID NO: 154

SEQ ID NO: 523 - protein, 526 aa, Khujand lyssavirus
MPSQAVFLVLTTVFSQCVGKFPIYTIPDKLGPWSPIDIHHLSCPNNLVVEDDGCTTLSGFTYMELKVGYITTIKVDGFTCTGIVTEAETYTNFVGYVTTTFKRKHFRPGPSACRDAYNWKAAGDPRYEESLHNPYPDSHWLRTVTTTKESLLIISPSVVDMDAYDKSLLSKIFPNGKCPGVSIASPFCSTNHDYTIWMPENTKTGMSCDIFTTSKGKRATKDGKLCGFVDERGLYKSLKGSCKLKLCGVSGLRLMDGSWVSIQNHEEAKWCPPDQLVNVHDFHSDEIEHLIVEELVKKREECLDALESIMTTKSISFRRLSHLRKLVPGFGKAYTIINKTLMEADAHYKSIREWSEIIPSKGCLVAGGRCYHHHNGVFFNGIILSPDGHVLIPEMQSALLQQHIELLESSVIPLMHPLADPSTVFKGDDGAEDFVEVHLPDVQKQISGIDLGLPEWKRYFLIGVAALTLFALTIFVVVCCRRVRRRERAKPNPVELIRKVSVTSQSGKVIPSWESYKVEAEGQSQA

SEQ ID NO: 524 - protein, 522 aa, Lagos bat lyssavirus; identical to SEQ ID NO: 150

SEQ ID NO: 525 - protein, 525 aa, Lleida bat lyssavirus
MAYQVTLILNSLSFITGQDIFPLYTIPDSIGPWTPIDLSHLKCPDNAFIVDENCTDHGEINYSELKPSFHSQSKVPGFTCTGIVTQAVTYTNFLGYVSTTFQRSHFVPNPRECRAAQEWKSKGDPRYEDSLQNPYPDSKWLRTVTTTRESLLIIEPAIAEMDIYNKTMFSSVFRGGLCDFSRGNPDYCETSHSYSIWMPYEESRGITCDIFQSSTGRLFKKDDQVCGIQDERGMFKSTRGACKMTICGKSGVRLYDGTWISYNTIDNLKVCPRSAMVNMHTTKLDALEEAVVRDLVKKREECLNAFEEIIITNSISFRKMSLFRKMVPGSGLVYTMINKTLMEAHGHYKSVSNWSEILPTPICLLVKGKCYQDHDGVLFNGIVKDHRGKVLIPEMQSHLLQDHFELLRSNTIPWRHPLVHYPDDTDPSSETAEFIQLHMRDPAKVTSDIDFGLSSWKRYLIFVACLILGLLILWVVIKYSFKVYRVMTKKRSSRRKMQDILPDPVIRSVGGNQLSWESYKNSTNL

SEQ ID NO: 526 - protein, 522 aa, Mokola lyssavirus; identical to SEQ ID NO: 22

SEQ ID NO: 527 - protein, 524 aa, Rabies lyssavirus; identical to SEQ ID NO: 21

SEQ ID NO: 528 - protein, 522 aa, Shimoni bat lyssavirus
MSNLCTIFILCASIMVSLGDFPLYTIPEKIGPWTPIDLTHLSCPNNLLSEDDGCSSSSTFSYIELRTGYLTHQKVSGFTCTGVINEAVTYTNFVGYVTTTFKRKHFKPTASACRDAYHWKISGDPRYEESLHTPYPDNSWLRTVTTTKESLLIISPSIVEMDIYSRSLHSPMFPTGRCYDFYKSTPSCLTNHDYTIWLPDDANVRLTCDIFVTSTGKKSMNGSKMCGFTDERGLYRTLKGACKLTLCGKPGLRLFDGTWISITRPEIVMWCSPNQLVNVHNNRVDEIEHLIVGDLIRRREECLDTLETVLMSKSVSFRRLSHFRKLVPGFGKAYTIANGSLMETNVHYKRVDRWEEILPSKGCLKLNDKCLNPENGVFFNGIIKGPDGQVLIPEMQSSLLKQHMDLLKASVFPLRHPLIDQTSIFKKDGEADDFVDVHMPDPHKSISNIDLGLPDWGLYAMIGGTVVAFLILVCLLCTCCKRRRRRNSRKPSSEQTPKISSTPPSGTKVISSWESYKGTSSV

SEQ ID NO: 529 - protein, 542 aa, Taiwan bat lyssavirus
MPNYTLLITLLLSYSYCSGYFPIYTIPDKIGPWSPIDIRDLSCPNNLLVEDEGCNTLSSFSYMELKIGYIKAIKVEGFTCTGVITEAETYTNLIGYVTTTFKRKHFRPTMSGCRDAYRWKITGDPRYEESLHNPYPDSSWLRTVTTSKESLLIISPSVADMDAYDKQLYAPIFPDGKCTNLLPGAFYCSTNHEYTIWMPKDPRLNLACDIFVNSKGKMAMKDGQVCGFIDERGLYKSLKGACKLKLCGISGIRLVDGSWVSIQRKNPPKPCSPGQLVNIHDFRTEEIEHLIVEDLVKKREECLDALETIMSTKTISFRKLSHFRKLVPGFGKAYTLINKTLMEADAHYRSIRNWTEVIPSKGCLRIGGYCHPHYDGIFFNGIILSPQGDVLIPEMQSALLQQHVELLESSVIPLRHPLADPSATLRESNEVEDFVEIHLPAVQKHVSDISLGLPEWKHYFYIIASLLAFLAFAILAAMFCRRFKRRKKPRPNSVELVRRTSVTSVSGRPVHSWESYKTGQQVAPEFVPPPHDTPNSPSRIHT

SEQ ID NO: 530 - protein, 525 aa, West Caucasian bat lyssavirus; identical to SEQ ID NO: 152

SEQ ID NO: 531 - protein, 522 aa, Culex ohlsrhavirus
MSVRTHIVFKLFLITSYVGENILALGPDNLMILFPTSTNIEWHDVSPSNLICPGASLHQKMDKGLYLPVRRPTIGKTPNLSGTLCIAMELVTTCYKGFFGSVDVTISSNPSVISEDDCRKEIASQSQGDYRSTEHPQPSCSWMRTSSVRRSIITLNPLDVHYDPYSDTLYSSIFLGGKCQTDVCPTVFENRIWIPHESLTEFCSAEKLSESKIILYNSSDTQSSFWSPDFVIPDDKTPCIMDFCGHKGLRFPSGDWVALSRDDIPKEEWVGEYFYHLTDCAPHTVVNVVDSGQDFNYISETLLDEFINEQCELTISKIKEGDLISRIELQTLSPRTPGFHPVYRYQPGTFQMSMTHYSWIVIKPTDVFPYIELFSHSNESIRYDYWTVDNKTGIIDGPNGLYVLNKNLIYGLREEQTFKRILSKSSKQKFPLFNTKISQPLSVIKLLSYSSHSFSNDATLAEVLWHPLLIGMVLTCACGLLVLVMIVYFKRNLVLRKVLSCMKESTKSTDDMSEEEGDYFDP

SEQ ID NO: 532 - protein, 517 aa, Ohlsdorf ohlsrhavirus
MVNYVKFPLLNMVSYFIWYSPDVLCQSILFPTTNTIDWIPLDPNDISCDFPYYPSESNSNLKIRGRSPILQTKYEINGFLCNAITTVTSCDKGFFGGETVTHSEYRPPLEFKDCENAIRKFKSGTLDTYEHPPPSCSWMKKSDNLKSTVLVQERTVLFDPYSNQLISSWFADGKCEYSPCSTVKQNMKWISDVNHPPECISDHLDEVIMFLTDSKSTNSYTIWSPDIHITDFNEICTMTYCSVNGFLFPNGEWVGINKNDIPSIPKLGEFLYNIKECNSSTHLHIKEHRYINRETEQTEFSILLSVECSKTKDDLLSQTSINRVQLQSLTPRIPGRHRVYRFHNNTLQMGYSEYKWVRTEKSVTFPFIKIILANGKEVRWPYWYLDPNNDIIEGPNGLFIKNKKLAYALSDLINYNRSILINGKISYDIPHVHLPKVSPINNIISTRDFNTINDDNLISVIRGWSPFHTITQSIFWLSAIVMVILILKYTVPLLINKIKNRRKSIDQDTELSVFYKP

SEQ ID NO: 533 - protein, 531 aa, Anguillid perhabdovirus
MDTLIKILLIIVILKSLHAHIEFVPHDLSKWRDISIEHLDCPIYGDLSNQATGTISVKYSSVQWGLKNNIDGYLCISAKWSVTCDYRWYGSKYISTSIEYVPTKESECRDAIKSSKNGELVSPHFMPENCGWNNVLTESVTYTTVSSHEVKLDPYQMTFVDSLFPGGKCSSSVCSTIYHQGVWISPSNNLGFCKDPVDHQGQLYMAGLVGAHGDIVKEVWNLRSVFKPEIGRSKHLTGSCWMTYCGQRGLRFSDGEWAGFQIPEISALKQVLLELPECGNDVLVHAHDTNTELREILEHMDESALNAICQQEVRRAKERGVVSDWLLSMMTPFTEGLGPVYRLNKGKLEASMGYYRKVYIDSSNAPQAFGQTEDKESVGWSDLVPKDADGAVLSMYNGNVVIDNQIKWAKNALGSHILDEISALEFETPVVHHPHLTILSVNHSDLVSSTHPNGQGVNLIESVSHWAGGLWASIGSGLMILVLVALVGFCTIKVCLAYVPSIWVQKNRSGKRRGTTSQRSTEQEMFELSAV

SEQ ID NO: 534 - protein, 519 aa, Perch perhabdovirus
MNTLIKILLIIIILREARSHIVLVPLDLGDWRTTEADQLDCPMHGDLSNQGTQAIELEYHTASWGLKNNIAGSLCVTAKWSITCDYRWYGSKYISTVIEYLPTTPEMCKEAKRASDRGESLAPHFPTENCGWNNVLTESQEFTTLTSHPVKLDAYSFILIDSMFEGGRCQSKECPVVFHQGMWIADQEAFGFCKDLDKHRGLLFKTGLRNSLGEIVRQEWNLNSVFQPEIGREKHFKGACKMSYCGNSGVRFSDREWFQLGTPSDNGIKKIIEGLPECGEDNLIHSHDTSNTLKELAEHVDEIALNAICLQEVRRARDTKAVSDWLLSMMSPFSEGIGKVYRIHKGRLESTVGFYRKVVLEGDGTPERLGVGLDKKPVSWDQFVVKTNDTRIQSMFNGNTVVNGKIKWVKNVLGAHILDEISALEFDVPLIPHPHLDGLKFNESHTISSHHPNGKGVNFVESVTHWAGGLWESIGSSAVIIVVLLICAFVAVKFCQRLIPSRRPPTRESSENVFMLRTV

SEQ ID NO: 535 - protein, 517 aa, Sea trout perhabdovirus
MDLLLKILLIIIIIKEAQSRIAFVPLDLGTWRATSVDQLDCPMQGDLVNQGTDAIEVQYQTAAWGLKNNVAGKLCVTAKWSITCDYRWYGSKYISTQIEYLPTTPEMCKEAKRQLDRGELLSPHFSSENCGWNNVLTESETYTTIVPHPVKLDAYSLTLIDNIFEGGKCHEEECPSLLHQGFWIADKNSLGLCKQLDPHIGRFFKTGLRNSMGTVVRQQWDVNSVFQPEIGREKNFNGACTMEFCGHQGLRFADREWFKIPEQADQTLKKVFKDLPPCGTDNLVHSHDINTDVKEITEHVHEVALHAICLQEVRRAKDSNTVSDWLLSMMTPFSEGAGPVYRIHNGELESTVGFYRKVLIEGGGTTEQLGIGFDKKPIKWDQFVVKTNDTRVQSMYNGNTVVNGEIHWAKNVLGSHILDEIAALEFDIPLIQHPHLDGILINETHVISSHHPNGKGVNFVESVTHWAGGIWESVGSSAIIIAVILVVGFVLVKLCMRFSMPVRRERREEGMMMLQRA

SEQ ID NO: 536 - protein, 505 aa, Minto sawgrhavirus
MMIVLFFFTTFTYAIGLWEPELGVYWVPTPITPWKAATHNNLICPPPATRISTSLSPSFNYTVPNPRNLMGHMQHDGWLCVSSLYATTCDTNFWGHQTITQSNLPVRMTSAACKKAVREHILGELAPPRYPDPYCYWMASHTQAITQIRVIEHPVTSDLYTETFVNSLFPGTHCAMNPCTTVHPDTMWETTTIIKKDCKILPNSNFTGYKDPRRPDREWVVIDNDSAIYLAGSCHMQYCGQKGLRTASGQWIPYEGPTKYPDCPESWLTRSTEHSNELKVNLEVQEVESRRACIEATQRIRDGAPISFHLLSYFQPRRTGYYHVYRIYKGILQYSKAWYEPLKDLNPSGKYTLGHFPNSSIYKIDPVRADKNGTLSAFNGVHVAPDGTIIVPEVELFKDTYSDTLLYQKARLIDHPATAIQANYTTLVPHYTSTTSFHRPDLTAWGASVWSAFWGKVMLISMAVASVLIIYVAIKCVPWAAITRRRAQPMPAVVTYTPSNSRVNW

SEQ ID NO: 537 - protein, 506 aa, Sawgrass sawgrhavirus
MLTHFTLLLFIPHTFGWEPELGEYWAPIPVTPWRPATKSDFSCPSLRVDPIPPLQLVNNTRMAYLMEGKARKEHPGWLCVRKMYQTTCDTNFWGHQTITHEELALPADQTECRQAIAHYIKGTYEDPRHPDPVCTWMAAEKVYNPNTALLPHSTVVDPFSYTFMDSLFPGTHCKTAPCPTVHPDVLWHTVTPLTEDCPGHTIIPIKIYNDKSARKKTHEWLSVSDGPLIPLGGSCSLTYCGQLGLRTPGGHWYPYPGSKRYPECKDAWRATPTFEGEGMRLDIELQEILARRECINVLQQIQSGAAPTFHMLSHFQPRHAGYYRAYRMKNNVIEYSLALYDPIFNVSVPPQVNFGAWQNGTRYYLPLVESGYPGTLSAFNGIHVMHNKTVVVPELELYKEHYAETLFYYTAQIAEHPSQMRQDNETELTPPTRTTITVKRPSIGGWLSSMWGSVWGKVTSAIGLVLAIFVIGLLIKILPWGRLLRRPSTPAPRTVVYTPATGNVAW

SEQ ID NO: 538 - protein, 562 aa, Capitata sigmavirus
MSNRSIKNFKMENIINKYRLVIYFSLILLDKFNTIKSESFSYPTSRILNWNPVSYNYLTCPQHHTSYDSTIHKHLDEILVRKPIYNDNLFVDGYLCRKVAYITRCVTSWTFTSSINKLIHGLSVSRTECLEKIKQLEEDELIQERFKEPDCRWNKIYDVESINFEIINHKVKLDPYTNNLVDPIFPGGITHSSKSATIHNDVIWISKVNTTFTCNRHIEMKGIVYTKLGVSERNLSGEIAMLHIEGFKDKSFQGACLLMYCNEQGVRFSDGEWISISYDLNFNHSFTNLLSDLNPCSSTVSLSLSNNYQRNIITMELTLETIFRLRCEDTIAKLINHIPITPYDVSFLAQSYPGPGNVYQIRDNVLMQAQGLYELLLVNSSESNGDVIGYHVNGTAFIEDRWYTDNHKSIHGLNGIVKFGGRIRYPGDIFKRRRTHDSLLKAKPLLKVSHPTVLDLSKIINSTDIEYGYHPNSVLDNSILEDTISEIKYLWSHLFDFSVLGQILWVALVVIVLVIGLSSYKVWRRVRETQTLDDIESINRRQNLHFRDIDSLRSLGVDSLSP

SEQ ID NO: 539 - protein, 624 aa, Drosophila affinis sigmavirus
MNPRHISFNPLPRCPWFLVLSLILVLSLGSPELNPGGYIPLKHHVKDMRDQKKSSNIFLVFPVYDECKWAPVDHKTLRCPIGSQTFPGLDNPKTFKVPVSRPYYQESGTIPGHLCTKYKLTTICDSNWAAVEEVTHTTHLQDIKLSECLAKVNARASGSDPEFLEHPIKQCTWTKTETSTIERVVVEPHPVIYDPYRGKYVDPIFPGGSYFGPGTITNSKSKAWIPAMSDKPEACKHEQSINSIVYIPNTSDHSAVNFKEHGKIWTDITREKSFTDACRMTFCDKEGVRFPDGELFFIGKATYIEGQFILMINSLPICAEETIVKLQDPFEEGHFSSSLGMAQIFLMKCHETISKLRNRDPVSQVDISYLSQSYPGHGLAYKWYEGTLTSCLVNYVIGALVDKNKKIVLGHGGTKSHVAGGYIYRDWSDSPVPGTLIGPNGILNISGTLEIPFDNMFREFIHSELTQETGYHNVSHHELKPIIDSLPDDIDWHEHPNNSIIPSDKPGIIGYVKGSWHTWQMYLYIWGLLMIIGGVIYIFVAYPGVWEFFKITFLCLFGWIYYVPKLFCLCCCKITSVITDRTKREGRRHESNHYQTDNERGLNIPLQQVPISTNRALMRVPNFH

SEQ ID NO: 540 - protein, 511 aa, Chaco sripuvirus
MQKYGFILLALGAIQVTHGNLFYFPVEKDIHWHPINYTSIRCPIRAGDQYPGYSANVQFRVPYSDSSNIINGHSCHKTQWVSECTETWYWTTDVKQYIRVLPVSLNECLEEKEKRGQGKSIAPFFEAPVCQWANTVRKENSFVILNEKRVQLDPYNGNVVDPLFPNGRCSTPVKGCPTIQDNVLWFTTEDPIKGVHMRTINLKYAPPRGDMKELSIWGEGVPVTKMSKSCKMSYANEEGVRFESGLWGIPIPGSDGKFTQWKDNLENCPEGTLLKLPNAHEEISEHQIEIEDLVLSLTCFEMINNFRDTGKISFTDLALLTPDHPGLGNVYRINKGVLEASSAFYQQCKIKPNKNDVICYGGNDFNTENKWKRWVDSGTPGTLSGYNGVYKMGGKIINAHENLMTNRIIDEDILKRDLKTVRHPIEVSVRKNSSHPIYFFDWTGERGNPVEDVFEGLNNFWRKAIEWIAIVSFTFLLCIAIFILFKLLGMFRSNKKDRLAGSGEHEMSLFR

SEQ ID NO: 541 - protein, 510 aa, sripur sripuvirus
MKTSYGIILLICGVISPAFNYVFHYPLEKNIHWYPANHSSLRCPVRSARILDTPTGGITLQLPGNPSNHDIPGYSCHKTEWVSECVETWYWSTDVKEYIRSVPVTFEECQRALQDKSIGNEVSPFFTAPTCQWSNTVRKVNTFVIVHSKDAKLDPYNLDRVDPIFPGGRCKSKEKYCPTIQAGVIWLQKVSQRITIEWQTIKAKYKRIGNNMEDWKLWGGGMPTSTFRGACKMDFAAKTGIRASNGFWFHVPNISDSAFKDAFNAMTQCPQNTEVKFPSAHEEVAEHEMEIQDLILTLRCRDIIDKFAETGQISFMDLSLFDPDNEGPAHVYRIRNGKLETGIVNYGECRVGNSGDKDPANSICIKIADDGIRAAIFYDDWVSTGEKGIQSAFNGLYRENGVIRHAGYNLFANKLTEKDIEKQDLQQVHHPIDLVIEKFMPGLNLTFDTTGQRGEVYDLFPDIKGFWRSVLEYSVIGFFVLITIIFIWIVVKCCGCFRMKRHNQIDDYYD

SEQ ID NO: 542 - protein, 514 aa, Charleville sripuvirus
MYPNYGIFAILLALAVSVYCDYTLYVPSEKSIHWTPANHTSLRCPIRSAVHPVSGRVGTLPFLIPLHPNDNNVAGYSCHKAEWTSECTETWYWTTDVKQYIRYIEPTFEECKAAWVKKRDGLNPNPYFEAPTCQWANTVRKSHQFTMINLKQVKIDPYNLDFVDPIFPGGRCSNQDSCKTVQSGVIWHPQRKNPQQTEYAWKNVQASYGKSRKESDVYLIWGGGIPTTKFNNSCKMNFKGKTGIRFSSGFWAGVEPSTWHDSAFKKVYEDLPNCSEGTTIKVPSAHEEIAEHEMEIDDLILSLKCYDIIRAFEETGKISFLDLGFFNPDTEGPAHIYRIKEGKLEAASVNYQACQIHPKPHDPTRVICKDSKIKVLYDEWVPTGVSGILSGFNGVYKDRGVVKYAGYNLWNNKLTEADIQQMELEAVPHPSVLVIEKFAPGMNITLETTGERGEMDLDLLGGISSGWRKFWKYTTAFIISILLLYLIYFALKFFKILKTPRTERPETMQMQGFY

SEQ ID NO: 543 - protein, 568 aa, Garba sunrhavirus
MKLLIIEFFAIITSFFASRCLSLEYMYFPTSVTKGFTPIHLDHLNCPYDIDDTEIENPVEVDCKILVTNLIDVEGEVCYKQKWVTNCYENFIGQQTINHRIHHLPISADDIVHKLSLDSNLVPPDANCQWMSDTETEDTKVICQPVTIKYDETLNLGSHPSLGTFPCVKPPCSIDKQHVFNSTDFTATNKGYKDTKVQFSTDQNGHIYETSFVKSDVFPKMSLEGACIEMTKSASNNNHAAKIILQSGLLLEVRDAFDLGSDDSYATGNSIHVNHNLAELKKLLLKKSKKNSTWGQVMFDQNSRSKMTFSSDVTGKFKQFGKLFVDLRICQKNDFKRVVVPTLDFQRSMTEMFVESKIDQLSCKKRLYEIMSTGSITGADLGLLSQNHEGPGPVYQLYKHDVTMAYGTYERFTWMPKTEGGKQYLGYVHIGNTKKWVECPEWVPDSESTDIKWCVNGIFERNGSLYHPVFGGDNIRDLKVAYQVRNLRKVEHLSLLLQTNNRTISNWEEYFKLESKHTFEGWNRVSHWFKGLSDEIKYIFYGLSFVFVLFCIVRLLRWRHRSQLYLDY

SEQ ID NO: 544 - protein, 534 aa, Kwatta sunrhavirus
MDKLIILTACLLGVVIASHDYYYFPVVQSKSFKKLPVGQLRCPPHSSEKPLSHKKIWGGYVLTQNIQTMPGTFVVKQRWGTTCTMNFWGVKTIRHHIIDEQILDARFTNITLKPVFPDEDCSWMTTATREITYYVGTKGELEYDISTGKTSDPVFGAFSCTEKLCYVDHRVVFIPDVAIAATSKGFKFVVFEISTDPDGVIRENSVIQSRDFPRMSLRKACVTEESVLGQRRLAFILRNGFFLVLEMGVKSGSHMLKKSTETLGSELILRASLRLSNDKFKGRDLSMLYTQEKISGAGSIDNLLNGFRVCDASDRSRIKQVGLGFNSLEQDERIMSRVDSLFCRVTLDRIRKCKKLTSVELGMFAQNYGGPGPVYRIKNDTLEVAQGIYKRIFWDPDTKNRLGYYVNETTEKEVNCPEWIKISEGFESCINGIIRYKNVTSHPLSPVNDLEQEEALFKEHFLEDVYHVPTQHLNPWAGWNPLHPPEIDRHFLGLKLPNIFGFMHNFEIYLVTFIVGLISLPLIIFCCRRKSSRY

SEQ ID NO: 545 - protein, 567 aa, Sunguru sunrhavirus
MSLLGLAVVSFISILSNVGSVEHLYFPVEMKSQFKPVKLEDLTCPYASDDMGFPSSVKADVQLLKTNLIRVPGTICYRQLWTIKCSENFFGVQTINKDIKDLELGHFPEKGDDKVYFPDPTCRWMSESETTAEFAICKDEEILFDETTGLGTDNQYGSFFCQKDYCPINKYVGFKPKRPLAEIIKEGFMDIEAEFSVNSRGFVDIHSLTRSHHYPRMSMKNACVRWRDHESKKKFDLILNNGFLIRFKSEFDIEVSPRLESNWVTKDYNTDDEVKKLINAKSHPNHGTHFSFQRDPWAKISDSVIKKEKFKFAHLILSLRNCEKEDDKRIKIPYIDFQTTDVEMYIESKIDQIACKRRLYEIITEKKFNLIDLGLLAPNHGGLGPVYHSYSKDISRGFGHYRRIIWDPQPEIGILGYYFDGGEQKNVTCPEWVRKNHSLSWCVNGIFKMGGKIFHPIYGADNLEELKIAFEERDVRSVEHPAILHDLHNREATTWKEYHKVTDDLRWKGVNLGIWDFFDSVIGKIVACALGGLMFLILFWVSASVIMRCCVKRSFHNPNAKRRSEEW

SEQ ID NO: 546 - protein, 538 aa, Walkabout sunrhavirus
MKSQFKPVKIEDLSCPYNQFERDHTSDLKIDVELLKNNLITKTGNLCYKQRWSTKCEENFFGIQKLNHSIIDLPLDEHPSSSDSNPLFPPPDCRWMSSSEVSKDYTICKQETIRFDETLGIGVDEQYGTFKCEKSYCRLDKYITFLPIGGVPQMRLEGFEKVKSYITLDQEGFVTPSSLIYSNHFPKMSLKESCMRWVDKGDYNYDIELITNNGFLLRLPLNINLKAKSGAILTPTIENNHISHTYHINDVIELLLARAKGIQKERKLFTFTRNHRWLKLADNSKLEDKFAKKDTPFIHFFTMIRDCEEKDEKRITVPTMDFQTIEAEMFVESKIDQMFCKHRLYDIMTKGKASLNDLALLSPNHGGLGPVYHRYANDITRGIGVYRRINWHPSKEGLGYYFKDSKQVWVKCPEWVNGTDGFRWCVNGIFELNGKVYHPYFGADNFQELIKSFEEDEVRRVKHNVILHDLGSRSHETWESYLGAKENYTWKGFNLSWIDSIRKWANNSWMIVVGVCSGLGILLLIKITRGKRSGGADW

SEQ ID NO: 547 - protein, 629 aa, Bas-Congo tibrovirus
MTRLSHAITKLLLLFCLTAIHAIVINYPTACHTYQEVLYQGLECPEPAISYKLDNNETVAYGQICRPQLASKDILEGYLCYKDTYISSCEETWYFTSQVKQTIVHEHVSDAECIESLAYYKSGIVETPMFLNVDCYWNAINSIKKSYLIIVYHPVPFDPYTNSIKDAVVKNSEDVNSWIRDTHYPFTKWIRDFNGTAEEKCDAQHWECFKVNLYKGWIYSPPHTKNTIGSSTQTGLILESDIYSHTLIRDLCRFQFCGIHGFVFQDQSWWDLQLNVSLSSLISTEHLSGAPDGHCKKVNEIGHAELEPNWEKILSVDDYDIRHQLCLDTLASVLGGGFLTARDLLKFAPMRPGLGPAYFLFNPNKRERAVHVWTAGATTSSILWKSTCKYELIDIPQLNDTGIITYEKLDNIIGKILRNDVGVSFKDLGFTENELTDDDVSQSQLNSSLGIYHRNTSMKGIPWKRHRASTPKLKMGPNGILHDLNAKIIHLPQASSSVFKLPPHLYEGHRVVFFNHITKKKIYEDLSKREGNDPYNVDIGDLIGRHLNRTTIPDQLHDWVSGIKRHIFSVFEQFGSLIKVVVFIIMLVLCIKIINLIYRFYKVRKSNHKKLASRKEKLHLSDPFSVNSK

SEQ ID NO: 548 - protein, 659 aa, Beatrice Hill tibrovirus
MFIKNLPVALILNCLGLTLSQLLYNYPFNCNPGPEMTLDGLTCPLDFNTFNLDNKDTIEAGTMCRPNPLSKDVEDGFLCYKDTWVTACEETWYFSKTVKNHIIHEHITKDECVEALATYKLGKHVEPFFPAPSCYWSAVNEERATFINIQPHGVILDPYSGKIKDPLIDPETCDNDFCITRSHQTHWLRNLKPDIMERCNNETWECHPINIYYGWVSKRKIQETSTTFNYVQTGLVIESQYIGHILMTDLCHMKFCGRDGYLFPDGSWWEIKYSVLHALTKDHTILHNVYNCDDRTHGDYLTDVQKSKKVGYEDLEINLEGLEMRQKSRSINMMCLNRLAEIRNTHHINVLDMSYLTPKHPGKGLAYYFSQDHNNASKYYVKTLKCDYKLIHIHDADIRGFVNISKYPEPNVTILGLQDNLTFANLGIARCHDFTQLNDSRNVSCEDSPGPFFNNNSRLSNGKRFWTRHSFGGANFHEHPGVRIGVNGIMYDLKKQILRFPSTSNLLWDLPSYYSTKHKVHFFKHPTKHNIRKNFTGSDKQDIDVLDDLINRHINRTDFPTRIRNWIGNIEDTVEHFFSNVGGTIKTMISLALFIIGTLVSIKIWRKCRKQPKNTPIIKQIKLNDYEKPHSRAEQTQDANEDLYENIETRGEIYSPFHV

SEQ ID NO: 549 - protein, 658 aa, Coastal Plains tibrovirus
MSSRILSVINLIAMFISASLSQLIYNYPFNCKQEINLLPFDSIQCPMDYNTFNLKSRSSVEEGTMCRPNPLATDLEEGYMCYKDRWVTRCEENWYFSKTVTNHIVHEPVSKDECVEALALFKMGQTKDPFFPAPSCYWSAANEESVTFLMIKKHPVVIDPYSGKIKDPLIDNDLCKDGFCKTRAHQTHWMRDYKTDIVERCDDKTWECHPIKVYYGWVPKIKNGTSSVTTSYVETGLVIESQYLGHVLVTDLCQKTFCQQDGYLFPDGSWWQIKISLTKLLLKNHNALEKAKTCGDRDHGSELTDEQRSGKIGFEDLEINLENIEMKQKSQTLNLMCLEKVAKMRNSQSVNFLDISYLTPKKPGPGLAYYIVEEPLMSGQTKVKVSNCQYKFVEILGSDKSGIVNVTEIGSQQIFKLLETGQVFNMSELGIPICEDHTQDNETRNITCETDFGISANRGVKGLSGKPLWTVRSFKGSNISNLRGLRIGSNGITYDMTKKILRFPQAGNMHWDIPSYYSTEHKVHFFQHPTKHEIYKNFTGDKKSDIDFLEDLIHRKLNRTDFPTRIKNWIGNIEDKVEHFFTNLSGTVRTAISLVIFVIGTLLSIKVWRRCKKQKPKTRKIDRSNQAKEENSFALDLHQNVYEDIEPNMRGHNPFHRS

SEQ ID NO: 550 - protein, 685 aa, Ekpoma 1 tibrovirus
MKKTTRRSSSETMILLIHLPVILTTLTKLISGDLINFPFHCTNLENIKYSNLSCPTVWETFKIKTGDKVERGSMCRPSLHTHDLEEGYLCYKDTWTTTCDESWYFSTEVKYKIIHEEVHDIDCLDALIEYKVGKLKAPFFPVATCYWASSTTESITFMMIKPHNAPLDPYSNRIVDPIIQADSGDNLKIYRTTFPKTRWIREVNTTLEERCNVATWECHDMTLYSGWLTHPSGAFKTSLRTGLVVDSQIMGHILLRDTCKMDFCGRRGFRFPDGGWWRLTTENEVSLQDFELNDTVVPKCDDRSRNHVGYTDLDYNPEKIALEQKSLLKTTMCREKLAELGQGKGMSLYDTTYLIPNAPGRYPAYYIYPVGLNKTLETQILKEKTISNPLTAKRKEHMPIMLYMAQCHYTLIEFPNLDSTGTLRYTSLEDPVGTILESGKNVSLADLGFEDINLDNTTCKGNDSDCFNTTTPKEPLLDRKFNMTNHTLPWRRYSKRELHHRVTYNGITHSPVGHWVQIPYGASLTANLPEHLIEKHSTHFFDHVTKQSIFERELQNGEISIDDLEQLIGRKTNHTDLPKKVRNWVQNAKESVVGIFREFGHTIRLGLSIVSFLIGLIISFKVWKKCRKNKKETQQQSRSSPIYRPQNIYELEEGPISPPPLARQREHDNSNIFRKTDPRNPFYSR

SEQ ID NO: 551 - protein, 630 aa, Ekpoma 2 tibrovirus
MQTMKKTHLLAFTIFGQILLASSLVVNLPLRCNGRKDLLVNSLKCPLPSTEVKVDGKVKVYEGDICRPQINAKDVEAGYLCHKDIYKAICDETWYFSATVKHEIEHAPISDIECIEGLTELKLGIVPNPQFPSVDCYWNARTEEKRTYIILTQHDPALDPYSNKIKDNVVDPDCDFNLCKTNFINTKWIRDKNTTEIERCDAKNWDCHPYKIYQGWISKSEMIGWGDPTQSYSYTGLVLDSHIYGHIPMSKLCHKTFCGKEGYLFPDKSWWQIRSKTPASPLFRELTLNGSRSAFPDCETIKTYGYAEVEEDESSEIIRESAEIRHEMCLETLSTLASGYEASFRDLMKFIPQRPGPGKAYSLNSNGKPSYYNYHWAGHPASSASIQEQDCYYYLVDIPKIQDDGILNITGIGNTDVCGKLLVNGSSMTLNSLGFKIDHHYDDHIVETGTDVHDEMNIKERMVWIKPDKIHPLLWVGPNGIVIDHQHKQIHFPVFSRGVDRIPHYWTQKHRVVKYRHATQLKIYKQYLDNPEKSNPYDFNAWTGRHVNRTEIPVAISNWFSGVKDTVFDKISKIGSWLKWSFYLCFIFVLFKGGLLVWNKYKTLRHQTKRTPKGKNSQDPEKLDIFGQTV

SEQ ID NO: 552 - protein, 662 aa, Sweetwater Branch tibrovirus
MALNKLIFVILINEISTQLLYNYPFNCKNEVKLTLDGLQCPLDYNTFNLRSDELSEVGTMCRPNPLAKDLEDGFLCYKDTWVTKCSESWYFSKTISNHIVHEPISKSECIEALATYKMGKHVEPFFPAPSCYWAADNEETVTFINIKEHPVILDPYSGKIKDPLIDNNLCDDDFCPTRAHQTHWLRNLKPNIMERCNNDTWECHPIKVYYGWVAKKRPTNVGHDLNYVQTGLIIESQYIGHIVMSDLCTIKFCSKLGYLFPDGSWWELKFPLDHLLLKNHQLLENSGSCSDRSHGDTLTKDQRGNKIGYEDLEVDLEGLELRQKSRNLNLICLDKVANIRNRKEVNILDISYLTPKHPGHGTAYYLYEDTSNASITHVKAYSCNYKLIQIHGADMNGRVNMSNSEDLNITILDSGDNMTIADLGISKCKDLSHLTVNQTRNISCEKNVGFKYPEQVKLSNGKVVWTSRSFGGANFHRLPGVRFGVNGITYDLKQQMLRFPTVNNLLWDLPSYYSTNHKVHFYTHPTKHEIRKNFTGERTEDIDFLDDLIHRKLNRTDFPTKVRNWIGDIENKVVHFFSNVGGTIKTAISLIFFVIGTLISIKIWRKCKKCKGQSKRSESEWVAKKQYTAKHEMKSFPSNFKTDNIYEDVKSELDSTYSPFHV

SEQ ID NO: 553 - protein, 662 aa, Tibrogargan tibrovirus; identical to SEQ ID NO: 169

SEQ ID NO: 554 - protein, 506 aa, Durham tupavirus
MWIILLHVSFVASQVIIAPLREPQEWRVATKSDFKCTPGMLDDIEGPIDFWRVSTIKADANLHIEGYACQAEIWISKCEETWYFSKTITHSVQFPEGTQHSCQDELRKQKAEGAPVFRFPDVECAYASTTTATSYFLRLTPMNVELNPYASTLLHPSFRDGKCTDLEVCPMLHHHGLWIPKEPIAKTEEQAVFEKVTIKYKLSYRHSKAYGYISGPAVPFSDLRDACKIKFAGTAGMRLGSGMWISLGGDHEQGGLGWSSKHTTNIFNDLQIDDCAPGTKVSVPHAGHIGDLLEIKMNHMAMQFLCLDALRNVFRENSTSRLDLAKLSPSDAGEHPVYQLSERGIEVGITMYGLINWAPDARENRLGYHYGTSKAEGKNPITWKRWTRTQDGKLNGPNGVYQSNNTIVHPNLALLGNLIMEDLAADFDLDPIKEPEVTHYDANWETESIGRGEDTRYMTHRNRFFFWGPWNSLKNILLASIITLIALITSTLLLCCVCKKRQHRSV

SEQ ID NO: 555 - protein, 533 aa, Klamath tupavirus
MFRTLFFSLLGLCTGLGNQDEGHTVVLPVQVPRNWKPATESDFTCNHPPQWEPDTPFVLLNAKMLAKQEPIQVRGWFCYKSKWTTGCGTNLLFSKSVTHKVTHLPVSEHECREAVDRERQGRSEPETFPDPVCAWMSDTTKDTVYTHVLPHAAQYDPRSNRLTSPGFPQGVCDNLRWCSATTPDRWWLPDSDLEVQKQLETHMDSVILKLFPMPFPAENPYVGPHSVVSGSRIPPTVVEGSCKLTLLGDEGIVLPTGIWLGIKYGDYQLLHGGRKMGKKLQVQQANLGFITKQCKAEDHRVIPTTESPFYRVQLSTLHYMQYQFCLESLDKLNNNQTLSRVDLSRFAPRLPGLGKVFQLRDSAVWVGMTMYEMAVIPTGDETSKDIIGYIQDSTEAYTVAIHWTDWSMGSNRVENGPNGIFRKTGKVYHPQGLYQDLSLDLELLLTHSVDIVRHPVLEHVKEIPQIDRVVKDQSQTTIHLNSGISHFWENFHWLGGVKDKVILGIVGVVSFVGTLIGGMWVCKSRKRDQKRGY

SEQ ID NO: 556 - protein, 531 aa, Tupaia tupavirus; identical to SEQ ID NO: 155

SEQ ID NO: 557 - protein, 511 aa, Alagoas vesiculovirus; identical to SEQ ID NO: 82

SEQ ID NO: 558 - protein, 523 aa, Carajas vesiculovirus; identical to SEQ ID NO: 84

SEQ ID NO: 559 - protein, 530 aa, Chandipura vesiculovirus
MTSSVTISVVLLISFITPLYSYLSIAFPENTKLDWKPVTKNTRYCPMGGEWFLEPGLQEESFLSSTPIGATPSKSDGFLCHAAKWVTTCDFRWYGPKYITHSIHNIKPTRSDCDTALASYKSGTLVSLGFPPESCGYASVTDSEFLVIMITPHHVGVDDYRGHWVDPLFVGGECDQSYCDTIHNSSVWIPADQTKKNICGQSFTPLTVTVAYDKTKEIAAGGIVFKSKYHSHMEGARTCRLSYCGRNGIKFPNGEWVSLDVKTRIQEKHLLPLFKECPAGTEVRSTLQSDGAQVLTSEIQRILDYSLCQNTWDKVERKEPLSPLDLSYLASKSPGKGLAYTVINGTLSFAHTRYVRMWIDGPVLKEPKGKRESPSGISSDIWTQWFKYGDMEIGPNGLLKTAGGYKFPWHLIGMGIVDNELHELSEANPLDHPQLPHAQSIADDSEEIFFGDTGVSKNPVELVTGWFTSWKESLAAGVVLILVVVLIYGVLRCFPVLCTTCRKPKWKKGVERSDSFEMRIFKPNNMRARV

SEQ ID NO: 560 - protein, 512 aa, Cocal vesiculovirus; identical to SEQ ID NO: 86

SEQ ID NO: 561 - protein, 511 aa, Indiana vesiculovirus
MKCLLYLAFLFIGVNCKFTIVFPHNQKGNWKNVPSNYHYCPSSSDLNWHNDLIGTAIQVKMPKSHKAIQADGWMCHASKWVTTCDFRWYGPKYITQSIRSFTPSVEQCKESIEQTKQGTWLNPGFPPQSCGYATVTDAEAVIVQVTPHHVLVDEYTGEWVDSQFINGKCSNYICPTVHNSTTWHSDYKVKGLCDSNLISMDITFFSEDGELSSLGKEGTGFRSNYFAYETGGKACKMQYCKHWGVRLPSGVWFEMADKDLFAAARFPECPEGSSISAPSQTSVDVSLIQDVERILDYSLCQETWSKIRAGLPISPVDLSYLAPKNPGTGPAFTIINGTLKYFETRYIRVDIAAPILSRMVGMISGTTTERELWDDWAPYEDVEIGPNGVLRTSSGYKFPLYMIGHGMLDSDLHLSSKAQVFEHPHIQDAASQLPDDESLFFGDTGLSKNPIELVEGWFSSWKSSIASFFFIIGLIIGLFLVLRVGIHLCIKLKHTKKRQIYTDIEMNRLGK

SEQ ID NO: 562 - protein, 523 aa, Isfahan vesiculovirus; identical to SEQ ID NO: 88

SEQ ID NO: 563 - protein, 524 aa, Jurona vesiculovirus; identical to SEQ ID NO: 89

SEQ ID NO: 564 - protein, 521 aa, Malpais Spring vesiculovirus; identical to SEQ ID NO: 90

SEQ ID NO: 565 - protein, 512 aa, Maraba vesiculovirus; identical to SEQ ID NO: 91

SEQ ID NO: 566 - protein, 513 aa, Morreton vesiculovirus; identical to SEQ ID NO: 92

SEQ ID NO: 567 - protein, 517 aa, New Jersey vesiculovirus
MLSYLIFALAVSPILGKIEIVFPQHTTGDWKRVPHEYNYCPTSADKNSHGTQTGIPVELTMPKGLTTHQVEGFMCHSALWMTTCDFRWYGPKYITHSIHNEEPTDYQCLEAIKSYKDGVSFNPGFPPQSCGYGTVTDAEAHIVTVTPHSVKVDEYTGEWIDPHFIGGRCKGQICETVHNSTKWFTSSDGESVCSQLFTLVGGIFFSDSEEITSMGLPETGIRSNYFPYISTEGICKMPFCRKQGYKLKNDLWFQIMDPDLDKTVRDLPHIKDCDLSSSIITPGEHATDISLISDVERILDYALCQNTWSKIESGEPITPVDLSYLGPKNPGVGPVFTIINGSLHYFTSKYLRVELESPVIPRMEGKVAGTRIVRQLWDQWFPFGEVEIGPNGVLKTKQGYKFPLHIIGTGEVDSDIKMERVVKHWEHPHIEAAQTFLKKDDTGEVLYYGDTGVSKNPVELVEGWFSGWRSSLMGVLAVIIGFVILMFLIKLIGVLSSLFRPKRRPIYKSDVEMAHFR

SEQ ID NO: 568 - protein, 525 aa, Perinet vesiculovirus; identical to SEQ ID NO: 94

SEQ ID NO: 569 - protein, 529 aa, Piry vesiculovirus; identical to SEQ ID NO: 95

SEQ ID NO: 570 - protein, 556 aa, Radi vesiculovirus; identical to SEQ ID NO: 96

SEQ ID NO: 571 - protein, 559 aa, Yug Bogdanovac vesiculovirus; identical to SEQ ID NO: 97

SEQ ID NO: 572 - protein, 514 aa, Zahedan zarhavirus
MVSFGLLLLFLSSASGLNVTAPFFLYPELVSPWRNITLDHAKCPISSPVATDQELSSETFPSGHQELHHELAPVKGYLCSGLRYTTECYEGFLGGKDIKKTIDKVQVTGDICLRELEKVKTGSVIPPYFPAPECAWMKTQTNDAVFYIIEEHSVSYDPYKIGFVDPIFLKDICVNKVCPTEHDNMLWVTEADVGHQCSEFLDAEITFHSNQNYSITIIEHQHKMFEDFTKACRMTYCGEKGVRLPSGLFYTHIPPPYWHNINECSVKRNVTFYPLSAELLEIEREMTVDRERMMCIESLQTARRTKVMTFLTLSYLVPKFEGRFPVYRLEKGQLKGAVANWHALKTVKPGTSRQIGTFPNGTNAYWWDWVDSGYPGIDSGFNGVHRTEGKVVIPRLEVLKKEYALSLDILHEMRTIEHPIIKHLARENLTGHLTTLEGRDSIDVGEWLSNLWEKIWGKLLLLGCLCGFLLVVCCCCFGRIRRCLSTTSRQNNDIEMLPLRTNLETVKIDRPVHW

SEQ ID NO: 573 - protein, 607 aa, Reptile sunshinevirus 1
MENQHIIIKKKKKGKKGKKNKKERKKKGKREKEREKKSTPKPQLKPKILTNLRGDSPMETPQLFSGRTGHQWSRRYIRYNYFLTLTLLTVIFADHQELTQNSDIIVSTVALETRVVSVQTGSSWFLLRVNTTFKNDGLTSRCTKLGENFVSHVNEFQENIKITASSLIPKQAILEVNTAKNLVSALTRTTRSNRRKRLAGAAIAVAAVAISGAALVTAGIALAETRTLAASVDSVISGAEKTNAALNQLTQTMKSFTKETQDNISTLAKEISEANKRIDCLEYYTEVKNQFLDFTSYNYEILQASMSKNGGIPLRLMKRIMVPNPQMTAQSNTIEELVLRRGRIRLLAYTNSTLTYRIDVPRFASMGKISPLLISVDEPISLIGSGIYTSILSVDLGIVLLDCEEDNISYLCSSSSPSDAIVKNCLKDSTADCISALQESGAKKGKYFVYQSGFLVSRCSQQVCTCLEPEIRRIYVSHPLSKETSQCTQVSIKTQDQTFRLLLTSVKAAGIINIQAPTEIKRKTWKDIGLTFGKYNTKFEEIEELIENSNGDLEKARTYLVLSQNLKVVVIVTSIVIAFLILFVIFILKRIYDLKNRVTKIEVYLER

SEQ ID NO: 574 - protein, 977 aa, Artificial Sequence
  CasX Variant
MQEIKRINKIRRRLVKDSNTKKAGKTGPMKTLLVRVMTPDLRERLENLRKKPENIPQPISNTSRANLNKLLTDYTEMKKAILHVYWEEFQKDPVGLMSRVAQPAPKNIDQRKLIPVKDGNERLTSSGFACSQCCQPLYVYKLEQVNDKGKPHTNYFGRCNVSEHERLILLSPHKPEANDELVTYSLGKFGQRALDFYSIHVTRESNHPVKPLEQIGGNSCASGPVGKALSDACMGAVASFLTKYQDIILEHQKVIKKNEKRLANLKDIASANGLAFPKITLPPQPHTKEGIEAYNNVVAQIVIWVNLNLWQKLKIGRDEAKPLQRLKGFPSFPLVERQANEVDWWDMVCNVKKLINEKKEDGKVFWQNLAGYKRQEALRPYLSSEEDRKKGKKFARYQFGDLLLHLEKKHGEDWGKVYDEAWERIDKKVEGLSKHIKLEEERRSEDAQSKAALTDWLRAKASFVIEGLKEADKDEFCRCELKLQKWYGDLRGKPFAIEAENSILDISGFSKQYNCAFIWQKDGVKKLNLYLIINYFKGGKLRFKKIKPEAFEANRFYTVINKKSGEIVPMEVNFNFDDPNLIILPLAFGKRQGREFIWNDLLSLETGSLKLANGRVIEKTLYNRRTRQDEPALFVALTFERREVLDSSNIKPMNLIGIDRGENIPAVIALTDPEGCPLSRFKDSLGNPTHILRIGESYKEKQRTIQAKKEVEQRRAGGYSRKYASKAKNLADDMVRNTARDLLYYAVTQDAMLIFENLSRGFGRQGKRTFMAERQYTRMEDWLTAKLAYEGLSKTYLSKTLAQYTSKTCSNCGFTITSADYDRVLEKLKKTATGWMTTINGKELKVEGQITYYNRYKRQNVVKDLSVELDRLSEESVNNDISSWTKGRSGEALSLLKKRFSHRPVQEKFVCLNCGFETHADEQAALNIARSWLFLRSQEYKKYQTNKTTGNTDKRAFVETWQSFYRKKLKEVWKPAV

SEQ ID NO: 575 - protein, 977 aa, Artificial Sequence
  CasX Variant
MQEIKRINKIRRRLVKDSNTKKAGKTGPMKTLLVRVMTPDLRERLENLRKKPENIPQPISNTSRANLNKLLTDYTEMKKAILHVYWEEFQKDPVGLMSRVAQPAPKNIDQRKLIPVKDGNERLTSSGFACSQCCQPLYVYKLEQVNDKGKPHTNYFGRCNVSEHERLILLSPHKPEANDELVTYSLGKFGQRALDFYSIHVTRESNHPVKPLEQIGGNSCASGPVGKALSDACMGAVASFLTKYQDIILEHQKVIKKNEKRLANLKDIASANGLAFPKITLPPQPHTKEGIEAYNNVVAQIVIWVNLNLWQKLKIGRDEAKPLQRLKGFPSFPLVERQANEVDWWDMVCNVKKLINEKKEDGKVFWQNLAGYKRQEALRPYLSSEEDRKKGKKFARYQFGDLLLHLEKKHGEDWGKVYDEAWERIDKKVEGLSKHIKLEEERRSEDAQSKAALTDWLRAKASFVIEGLKEADKDEFCRCELKLQKWYGDLRGKPFAIEAENSILDISGFSKQYNCAFIWQKDGVKKLNLYLIINYFKGGKLRFKKIKPEAFEANRFYTVINKKSGEIVPMEVNFNFDDPNLIILPLAFGKRQGREFIWNDLLSLETGSLKLANGRVIEKTLYNRRTRQDEPALFVALTFERREVLDSSNIKPMNLIGIDRGENIPAVIALTDPEGCPLSRFKDSLGNPTHILRIGESYKEKQRTIQAKKEVEQRRAGGYSRKYASKAKNLADDMVRNTARDLLYYAVTQDAMLIFENLSRGFGRQGKRTFMAERQYTRMEDWLTAKLAYEGLSKTYLSKTLAQYTSKTCSNCGFTITSADYDRVLEKLKKTATGWMTTINGKELKVEGQITYYNRRKRQNVVKDLSVELDRLSEESVNNDISSWTKGRSGEALSLLKKRFSHRPVQEKFVCLNCGFETHADEQAALNIARSWLFLRSQEYKKYQTNKTTGNTDKRAFVETWQSFYRKKLKEVWKPAV

SEQ ID NO: 576 - protein, 977 aa, Artificial Sequence
  CasX Variant
MQEIKRINKIRRRLVKDSNTKKAGKTGPMKTLLVRVMTPDLRERLENLRKKPENIPQPISNTSRANLNKLLTDYTEMKKAILHVYWEEFQKDPVGLMSRVAQPAPKNIDQRKLIPVKDGNERLTSSGFACSQCCQPLYVYKLEQVNDKGKPHTNYFGRCNVSEHERLILLSPHKPEANDELVTYSLGKFGQRALDFYSIHVTRESNHPVKPLEQIGGNSCASGPVGKALSDACMGAVASFLTKYQDIILEHQKVIKKNEKRLANLKDIASANGLAFPKITLPPQPHTKEGIEAYNNVVAQIVIWVNLNLWQKLKIGRDEAKPLQRLKGFPSFPLVERQANEVDWWDMVCNVKKLINEKKEDGKVFWQNLAGYKRQEALRPYLSSEEDRKKGKKFARYQFGDLLLHLEKKHGEDWGKVYDEAWERIDKKVEGLSKHIKLEEERRSEDAQSKAALTDWLRAKASFVIEGLKEADKDEFCRCELKLQKWYGDLRGKPFAIEAENSILDISGFSKQYNCAFIWQKDGVKKLNLYLIINYFKGGKLRFKKIKPEAFEANRFYTVINKKSGEIVPMEVNFNFDDPNLIILPLAFGKRQGREFIWNDLLSLETGSLKLANGRVIEKTLYNRRTRQDEPALFVALTFERREVLDSSNIKPMNLIGVDRGENIPAVIALTDPEGCPLSRFKDSLGNPTHILRIGESYKEKQRTIQAKKEVEQRRAGGYSRKYASKAKNLADDMVRNTARDLLYYAVTQDAMLIFENLSRGFGRQGKRTFMAERQYTRMEDWLTAKLAYEGLSKTYLSKTLAQYTSKTCSNCGFTITSADYDRVLEKLKKTATGWMTTINGKELKVEGQITYYNRRKRQNVVKDLSVELDRLSEESVNNDISSWTKGRSGEALSLLKKRFSHRPVQEKFVCLNCGFETHADEQAALNIARSWLFLRSQEYKKYQTNKTTGNTDKRAFVETWQSFYRKKLKEVWKPAV

SEQ ID NO: 577 - protein, 977 aa, Artificial Sequence
  CasX Variant
MQEIKRINKIRRRLVKDSNTKKAGKTGPMKTLLVRVMTPDLRERLENLRKKPENIPQPISNTSRANLNKLLTDYTEMKKAILHVYWEEFQKDPVGLMSRVAQPAPKNIDQRKLIPVKDGNERLTSSGFACSQCCQPLYVYKLEQVNDKGKPHTNYFGRCNVSEHERLILLSPHKPEANDELVTYSLGKFGQRALDFYSIHVTRESNHPVKPLEQIGGNSCASGPVGKALSDACMGAVASFLTKYQDIILEHQKVIKKNEKRLANLKDIASANGLAFPKITLPPQPHTKEGIEAYNNVVAQIVIWVNLNLWQKLKIGRDEAKPLQRLKGFPSFPLVERQANEVDWWDMVCNVKKLINEKKEDGKVFWQNLAGYKRQEALRPYLSSENDRKKGKKFARYQFGDLLLHLEKKHGEDWGKVYDEAWERIDKKVEGLSKHIKLEEERRSEDAQSKAALTDWLRAKASFVIEGLKEADKDEFCRCELKLQKWYGDLRGKPFAIEAENSILDISGFSKQYNCAFIWQKDGVKKLNLYLIINYFKGGKLRFKKIKPEAFEANRFYTVINKKSGEIVPMEVNFNFDDPNLIILPLAFGKRQGREFIWNDLLSLETGSLKLANGRVIEKTLYNRRTRQDEPALFVALTFERREVLDSSNIKPMNLIGVDRGENIPAVIALTDPEGCPLSRFKDSLGNPTHILRIGESYKEKQRTIQAKKEVEQRRAGGYSRKYASKAKNLADDMVRNTARDLLYYAVTQDAMLIFENLSRGFGRQGKRTFMAERQYTRMEDWLTAKLAYEGLSKTYLSKTLAQYTSKTCSNCGFTITSADYDRVLEKLKKTATGWMTTINGKELKVEGQITYYNRRKRQNVVKDLSVELDRLSEESVNNDISSWTKGRSGEALSLLKKRFSHRPVQEKFVCLNCGFETHADEQAALNIARSWLFLRSQEYKKYQTNKTTGNTDKRAFVETWQSFYRKKLKEVWKPAV

SEQ ID NO: 578 - protein, 977 aa, Artificial Sequence
  CasX Variant
MQEIKRINKIRRRLVKDSNTKKAGKTGPMKTLLVRVMTPDLRERLENLRKKPENIPQPISNTSRANLNKLLTDYTEMKKAILHVYWEEFQKDPVGLMSRVAQPAPKNIDQRKLIPVKDGNERLTSSGFACSQCCQPLYVYKLEQVNDKGKPHTNYFGRCNVSEHERLILLSPHKPEANDELVTYSLGKFGQRALDFYSIHVTRESNHPVKPLEQIGGNSCASGPVGKALSDACMGAVASFLTKYQDIILEHQKVIKKNEKRLANLKDIASANGLAFPKITLPPQPHTKEGIEAYNNVVAQIVIWVNLNLWQKLKIGRDEAKPLQRLKGFPSFPLVERQANEVDWWDMVCNVKKLINEKKEDGKVFWQNLAGYKRQEALRPYLSSEEDRKKGKKFARYQFGDLLKHLEKKHGEDWGKVYDEAWERIDKKVEGLSKHIKLEEERRSEDAQSKAALTDWLRAKASFVIEGLKEADKDEFCRCELKLQKWYGDLRGKPFAIEAENSILDISGFSKQYNCAFIWQKDGVKKLNLYLIINYFKGGKLRFKKIKPEAFEANRFYTVINKKSGEIVPMEVNFNFDDPNLIILPLAFGKRQGREFIWNDLLSLETGSLKLANGRVIEKTLYNRRTRQDEPALFVALTFERREVLDSSNIKPMNLIGVDRGENIPAVIALTDPEGCPLSRFKDSLGNPTHILRIGESYKEKQRTIQAKKEVEQRRAGGYSRKYASKAKNLADDMVRNTARDLLYYAVTQDAMLIFENLSRGFGRQGKRTFMAERQYTRMEDWLTAKLAYEGLSKTYLSKTLAQYTSKTCSNCGFTITSADYDRVLEKLKKTATGWMTTINGKELKVEGQITYYNRRKRQNVVKDLSVELDRLSEESVNNDISSWTKGRSGEALSLLKKRFSHRPVQEKFVCLNCGFETHADEQAALNIARSWLFLRSQEYKKYQTNKTTGNTDKRAFVETWQSFYRKKLKEVWKPAV

SEQ ID NO: 579 - protein, 978 aa, Artificial Sequence
  CasX Variant
MQEIKRINKIRRRLVKDSNTKKAGKTGPMKTLLVRVMTPDLRERLENLRKKPENIPQPISNTSRANLNKLLTDYTEMKKAILHVYWEEFQKDPVGLMSRVAQPAPKNIDQRKLIPVKDGNERLTSSGFACSQCCQPLYVYKLEQVNDKGKPHTNYFGRCNVSEHERLILLSPHKPEANDELVTYSLGKFGQVRALDFYSIHVTRESNHPVKPLEQIGGNSCASGPVGKALSDACMGAVASFLTKYQDIILEHQKVIKKNEKRLANLKDIASANGLAFPKITLPPQPHTKEGIEAYNNVVAQIVIWVNLNLWQKLKIGRDEAKPLQRLKGFPSFPLVERQANEVDWWDMVCNVKKLINEKKEDGKVFWQNLAGYKRQEALRPYLSSEEDRKKGKKFARYQFGDLLLHLEKKHGEDWGKVYDEAWERIDKKVEGLSKHIKLEEERRSEDAQSKAALTDWLRAKASFVIEGLKEADKDEFCRCELKLQKWYGDLRGKPFAIEAENSILDISGFSKQYNCAFIWQKDGVKKLNLYLIINYFKGGKLRFKKIKPEAFEANRFYTVINKKSGEIVPMEVNFNFDDPNLIILPLAFGKRQGREFIWNDLLSLETGSLKLANGRVIEKTLYNRRTRQDEPALFVALTFERREVLDSSNIKPMNLIGVDRGENIPAVIALTDPEGCPLSRFKDSLGNPTHILRIGESYKEKQRTIQAKKEVEQRRAGGYSRKYASKAKNLADDMVRNTARDLLYYAVTQDAMLIFENLSRGFGRQGKRTFMAERQYTRMEDWLTAKLAYEGLSKTYLSKTLAQYTSKTCSNCGFTITSADYDRVLEKLKKTATGWMTTINGKELKVEGQITYYNRRKRQNVVKDLSVELDRLSEESVNNDISSWTKGRSGEALSLLKKRFSHRPVQEKFVCLNCGFETHADEQAALNIARSWLFLRSQEYKKYQTNKTTGNTDKRAFVETWQSFYRKKLKEVWKPAV

SEQ ID NO: 580 - protein, 977 aa, Artificial Sequence
  CasX Variant
MQEIKRINKIRRRLVKDSNTKKAGKTGPMKTLLVRVMTPDLRERLENLRKKPENIPQPISNTSRANLNKLLTDYTEMKKAILHVYWEEFQKDPVGLMSRVAQPAPKNIDQRKLIPVKDGNERLTSSGFACSQCCQPLYVYKLEQVNDKGKPHTNYFGRCNVSEHERLILLSPHKPEANDELVTYSLGKFGQRALDFYSIHVTRESNHPVKPLEQIGGNSCASGPVGKALSDACMGAVASFLTKYQDIILEHQKVIKKNEKRLANLKDIASANGLAFPKITLPPQPHTKEGIEAYNNVVAQIVIWVNLNLWQKLKIGRDEAKPLQRLKGFPSFPLVERQANEVDWWDMVCNVKKLINEKKEDGKVFWQNLAGYKRQEALRPYLSSENDRKKGKKFARYQFGDLLKHLEKKHGEDWGKVYDEAWERIDKKVEGLSKHIKLEEERRSEDAQSKAALTDWLRAKASFVIEGLKEADKDEFCRCELKLQKWYGDLRGKPFAIEAENSILDISGFSKQYNCAFIWQKDGVKKLNLYLIINYFKGGKLRFKKIKPEAFEANRFYTVINKKSGEIVPMEVNFNFDDPNLIILPLAFGKRQGREFIWNDLLSLETGSLKLANGRVIEKTLYNRRTRQDEPALFVALTFERREVLDSSNIKPMNLIGVDRGENIPAVIALTDPEGCPLSRFKDSLGNPTHILRIGESYKEKQRTIQAKKEVEQRRAGGYSRKYASKAKNLADDMVRNTARDLLYYAVTQDAMLIFENLSRGFGRQGKRTFMAERQYTRMEDWLTAKLAYEGLSKTYLSKTLAQYTSKTCSNCGFTITSADYDRVLEKLKKTATGWMTTINGKELKVEGQITYYNRRKRQNVVKDLSVELDRLSEESVNNDISSWTKGRSGEALSLLKKRFSHRPVQEKFVCLNCGFETHADEQAALNIARSWLFLRSQEYKKYQTNKTTGNTDKRAFVETWQSFYRKKLKEVWKPAV

SEQ ID NO: 581 - protein, 977 aa, Artificial Sequence
  CasX Variant
MQEIKRINKIRRRLVKDSNTKKAGKTGPMKTLLVRVMTPDLRERLENLRKKPENIPQPISNTSRANLNKLLTDYTEMKKAILHVYWEEFQKDPVGLMSRVAQPAPKNIDQRKLIPVKDGNERLTSSGFACSQCCQPLYVYKLEQVNDKGKPHTNYFGRCNVSEHERLILLSPHKPEANDELVTYSLGKFGQRALDFYSIHVTRESNHPVKPLEQIGGNSCASGPVGKALSDACMGAVASFLTKYQDIILEHQKVIKKNEKRLANLKDIASANGLAFPKITLPPQPHTKEGIEAYNNVVAQIVIWVNLNLWQKLKIGRDEAKPLQRLKGFPSFPLVERQANEVDWWDMVCNVKKLINEKKEDGKVFWQNLAGYKRQEALRPYLSSEEDRKKGKKFARYQLGDLLLHLEKKHGEDWGKVYDEAWERIDKKVEGLSKHIKLEEERRSEDAQSKAALTDWLRAKASFVIEGLKEADKDEFCRCELKLQKWYGDLRGKPFAIEAENSILDISGFSKQYNCAFIWQKDGVKKLNLYLIINYFKGGKLRFKKIKPEAFEANRFYTVINKKSGEIVPMEVNFNFDDPNLIILPLAFGKRQGREFIWNDLLSLETGSLKLANGRVIEKTLYNRRTRQDEPALFVALTFERREVLDSSNIKPMNLIGVDRGENIPAVIALTDPEGCPLSRFKDSLGNPTHILRIGESYKEKQRTIQAKKEVEQRRAGGYSRKYASKAKNLADDMVRNTARDLLYYAVTQDAMLIFENLSRGFGRQGKRTFMAERQYTRMEDWLTAKLAYEGLSKTYLSKTLAQYTSKTCSNCGFTITSADYDRVLEKLKKTATGWMTTINGKELKVEGQITYYNRRKRQNVVKDLSVELDRLSEESVNNDISSWTKGRSGEALSLLKKRFSHRPVQEKFVCLNCGFETHADEQAALNIARSWLFLRSQEYKKYQTNKTTGNTDKRAFVETWQSFYRKKLKEVWKPAV

SEQ ID NO: 582 - protein, 977 aa, Artificial Sequence
  CasX Variant
MQEIKRINKIRRRLVKDSNTKKAGKTGPMKTLLVRVMTPDLRERLENLRKKPENIPQPISNTSRANLNKLLTDYTEMKKAILHVYWEEFQKDPVGLMSRVAQPAPKNIDQRKLIPVKDGNERLTSSGFACSQCCQPLYVYKLEQVNDKGKPHTNYFGRCNVSEHERLILLSPHKPEANDELVTYSLGKFGQRALDFYSIHVTRESNHPVKPLEQIGGNSCASGPVGKALSDACMGAVASFLTKYQDIILEHQKVIKKNEKRLANLKDIASANGLAFPKITLPPQPHTKEGIEAYNNVVAQIVIWVNLNLWQKLKIGRDEAKPLQRLKGFPSFPLVERQANEVDWWDMVCNVKKLINEKKEDGKVFWQNLAGYKRQEALRPYLSSENDRKKGKKFARYQLGDLLLHLEKKHGEDWGKVYDEAWERIDKKVEGLSKHIKLEEERRSEDAQSKAALTDWLRAKASFVIEGLKEADKDEFCRCELKLQKWYGDLRGKPFAIEAENSILDISGFSKQYNCAFIWQKDGVKKLNLYLIINYFKGGKLRFKKIKPEAFEANRFYTVINKKSGEIVPMEVNFNFDDPNLIILPLAFGKRQGREFIWNDLLSLETGSLKLANGRVIEKTLYNRRTRQDEPALFVALTFERREVLDSSNIKPMNLIGVDRGENIPAVIALTDPEGCPLSRFKDSLGNPTHILRIGESYKEKQRTIQAKKEVEQRRAGGYSRKYASKAKNLADDMVRNTARDLLYYAVTQDAMLIFENLSRGFGRQGKRTFMAERQYTRMEDWLTAKLAYEGLSKTYLSKTLAQYTSKTCSNCGFTITSADYDRVLEKLKKTATGWMTTINGKELKVEGQITYYNRRKRQNVVKDLSVELDRLSEESVNNDISSWTKGRSGEALSLLKKRFSHRPVQEKFVCLNCGFETHADEQAALNIARSWLFLRSQEYKKYQTNKTTGNTDKRAFVETWQSFYRKKLKEVWKPAV

SEQ ID NO: 583 - protein, 977 aa, Artificial Sequence
  CasX Variant
MQEIKRINKIRRRLVKDSNTKKAGKTGPMKTLLVRVMTPDLRERLENLRKKPENIPQPISNTSRANLNKLLTDYTEMKKAILHVYWEEFQKDPVGLMSRVAQPAPKNIDQRKLIPVKDGNERLTSSGFACSQCCQPLYVYKLEQVNDKGKPHTNYFGRCNVSEHERLILLSPHKPEANDELVTYSLGKFGQRALDFYSIHVTRESNHPVKPLEQIGGNSCASGPVGKALSDACMGAVASFLTKYQDIILEHQKVIKKNEKRLANLKDIASANGLAFPKITLPPQPHTKEGIEAYNNVVAQIVIWVNLNLWQKLKIGRDEAKPLQRLKGFPSFPLVERQANEVDWWDMVCNVKKLINEKKEDGKVFWQNLAGYKRQEALRPYLSSEEDRKKGKKFARYQLGDLLLHLEKKHGEDWGKVYDEAWERIDKKVEGLSKHIKLEEERRSEDAQSKAALTDWLRAKASFVIEGLKEADKDEFSRCELKLQKWYGDLRGKPFAIEAENSILDISGFSKQYNCAFIWQKDGVKKLNLYLIINYFKGGKLRFKKIKPEAFEANRFYTVINKKSGEIVPMEVNFNFDDPNLIILPLAFGKRQGREFIWNDLLSLETGSLKLANGRVIEKTLYNRRTRQDEPALFVALTFERREVLDSSNIKPMNLIGVDRGENIPAVIALTDPEGCPLSRFKDSLGNPTHILRIGESYKEKQRTIQAKKEVEQRRAGGYSRKYASKAKNLADDMVRNTARDLLYYAVTQDAMLIFENLSRGFGRQGKRTFMAERQYTRMEDWLTAKLAYEGLSKTYLSKTLAQYTSKTCSNCGFTITSADYDRVLEKLKKTATGWMTTINGKELKVEGQITYYNRRKRQNVVKDLSVELDRLSEESVNNDISSWTKGRSGEALSLLKKRFSHRPVQEKFVCLNCGFETHADEQAALNIARSWLFLRSQEYKKYQTNKTTGNTDKRAFVETWQSFYRKKLKEVWKPAV

SEQ ID NO: 584 - protein, 977 aa, Artificial Sequence
  CasX Variant
MQEIKRINKIRRRLVKDSNTKKAGKTGPMKTLLVRVMTPDLRERLENLRKKPENIPQPISNTSRANLNKLLTDYTEMKKAILHVYWEEFQKDPVGLMSRVAQPAPKNIDQRKLIPVKDGNERLTSSGFACSQCCQPLYVYKLEQVNDKGKPHTNYFGRCNVSEHERLILLSPHKPEANDELVTYSLGKFGQRALDFYSIHVTRESNHPVKPLEQIGGNSCASGPVGKALSDACMGAVASFLTKYQDIILEHQKVIKKNEKRLANLKDIASANGLAFPKITLPPQPHTKEGIEAYNNVVAQIVIWVNLNLWQKLKIGRDEAKPLQRLKGFPSFPLVERQANEVDWWDMVCNVKKLINEKKEDGKVFWQNLAGYKRQEALRPYLSSEEDRKKGKKFARYQLGDLLKHLEKKHGEDWGKVYDEAWERIDKKVEGLSKHIKLEEERRSEDAQSKAALTDWLRAKASFVIEGLKEADKDEFCRCELKLQKWYGDLRGKPFAIEAENSILDISGFSKQYNCAFIWQKDGVKKLNLYLIINYFKGGKLRFKKIKPEAFEANRFYTVINKKSGEIVPMEVNFNFDDPNLIILPLAFGKRQGREFIWNDLLSLETGSLKLANGRVIEKTLYNRRTRQDEPALFVALTFERREVLDSSNIKPMNLIGVDRGENIPAVIALTDPEGCPLSRFKDSLGNPTHILRIGESYKEKQRTIQAKKEVEQRRAGGYSRKYASKAKNLADDMVRNTARDLLYYAVTQDAMLIFENLSRGFGRQGKRTFMAERQYTRMEDWLTAKLAYEGLSKTYLSKTLAQYTSKTCSNCGFTITSADYDRVLEKLKKTATGWMTTINGKELKVEGQITYYNRRKRQNVVKDLSVELDRLSEESVNNDISSWTKGRSGEALSLLKKRFSHRPVQEKFVCLNCGFETHADEQAALNIARSWLFLRSQEYKKYQTNKTTGNTDKRAFVETWQSFYRKKLKEVWKPAV

SEQ ID NO: 585 - protein, 977 aa, Artificial Sequence
  CasX Variant
MQEIKRINKIRRRLVKDSNTKKAGKTGPMKTLLVRVMTPDLRERLENLRKKPENIPQPISNTSRANLNKLLTDYTEMKKAILHVYWEEFQKDPVGLMSRVAQPAPKNIDQRKLIPVKDGNERLTSSGFACSQCCQPLYVYKLEQVNDKGKPHTNYFGRCNVSEHERLILLSPHKPEANDELVTYSLGKFGQRALDFYSIHVTRESNHPVKPLEQIGGNSCASGPVGKALSDACMGAVASFLTKYQDIILEHQKVIKKNEKRLANLKDIASANGLAFPKITLPPQPHTKEGIEAYNNVVAQIVIWVNLNLWQKLKIGRDEAKPLQRLKGFPSFPLVERQANEVDWWDMVCNVKKLINEKKEDGKVFWQNLAGYKRQEALRPYLSSENDRKKGKKFARYQLGDLLKHLEKKHGEDWGKVYDEAWERIDKKVEGLSKHIKLEEERRSEDAQSKAALTDWLRAKASFVIEGLKEADKDEFSRCELKLQKWYGDLRGKPFAIEAENSILDISGFSKQYNCAFIWQKDGVKKLNLYLIINYFKGGKLRFKKIKPEAFEANRFYTVINKKSGEIVPMEVNFNFDDPNLIILPLAFGKRQGREFIWNDLLSLETGSLKLANGRVIEKTLYNRRTRQDEPALFVALTFERREVLDSSNIKPMNLIGVDRGENIPAVIALTDPEGCPLSRFKDSLGNPTHILRIGESYKEKQRTIQAKKEVEQRRAGGYSRKYASKAKNLADDMVRNTARDLLYYAVTQDAMLIFENLSRGFGRQGKRTFMAERQYTRMEDWLTAKLAYEGLSKTYLSKTLAQYTSKTCSNCGFTITSADYDRVLEKLKKTATGWMTTINGKELKVEGQITYYNRRKRQNVVKDLSVELDRLSEESVNNDISSWTKGRSGEALSLLKKRFSHRPVQEKFVCLNCGFETHADEQAALNIARSWLFLRSQEYKKYQTNKTTGNTDKRAFVETWQSFYRKKLKEVWKPAV

SEQ ID NO: 586 - protein, 977 aa, Artificial Sequence
  CasX Variant
MQEIKRINKIRRRLVKDSNTKKAGKTGPMKTLLVRVMTPDLRERLENLRKKPENIPQPISNTSRANLNKLLTDYTEMKKAILHVYWEEFQKDPVGLMSRVAQPAPKNIDQRKLIPVKDGNERLTSSGFACSQCCQPLYVYKLEQVNDKGKPHTNYFGRCNVSEHERLILLSPHKPEANDELVTYSLGKFGQRALDFYSIHVTRESNHPVKPLEQIGGNSCASGPVGKALSDACMGAVASFLTKYQDIILEHQKVIKKNEKRLANLKDIASANGLAFPKITLPPQPHTKEGIEAYNNVVAQIVIWVNLNLWQKLKIGRDEAKPLQRLKGFPSFPLVERQANEVDWWDMVCNVKKLINEKKEDGKVFWQNLAGYKRQEALRPYLSSEEDRKKGKKFARYQLGDLLLHLEKKHGEDWGKVYDEAWERIDKKVEGLSKHIKLEEERRSEDAQSKAALTDWLRAKASFVIEGLKEADKDEFCRCELKLQKWYGDLRGKPFAIEAENSILDISGFSKQYNCAFIWQKDGVKKLNLYLIINYFKGGKLRFKKIKPEAFEANRFYTVINKKSGEIVPMEVNFNFDDPNLIILPLAFGKRQGREFIWNDLLSLETGSLKLANGRVIEKTLYNRRTRQDEPALFVALTFERREVLDSSNIKPMNLIGVDRGENIPAVIALTDPEGCPLSRFKDSLGNPTHILRIGESYKEKQRTIQAKKEVEQRRAGGYSRKYASKAKNLADDMVRNTARDLLYYAVTQDAMLIFENLSRGFGRQGKRTFMAERQYTRMEDWLTAKLAYEGLSKTLLSKTLAQYTSKTCSNCGFTITSADYDRVLEKLKKTATGWMTTINGKELKVEGQITYYNRRKRQNVVKDLSVELDRLSEESVNNDISSWTKGRSGEALSLLKKRFSHRPVQEKFVCLNCGFETHADEQAALNIARSWLFLRSQEYKKYQTNKTTGNTDKRAFVETWQSFYRKKLKEVWKPAV

SEQ ID NO: 587 - protein, 977 aa, Artificial Sequence
  CasX Variant
MQEIKRINKIRRRLVKDSNTKKAGKTGPMKTLLVRVMTPDLRERLENLRKKPENIPQPISNTSRANLNKLLTDYTEMKKAILHVYWEEFQKDPVGLMSRVAQPAPKNIDQRKLIPVKDGNERLTSSGFACSQCCQPLYVYKLEQVNDKGKPHTNYFGRCNVSEHERLILLSPHKPEANDELVTYSLGKFGQRALDFYSIHVTRESNHPVKPLEQIGGNSCASGPVGKALSDACMGAVASFLTKYQDIILEHQKVIKKNEKRLANLKDIASANGLAFPKITLPPQPHTKEGIEAYNNVVAQIVIWVNLNLWQKLKIGRDEAKPLQRLKGFPSFPLVERQANEVDWWDMVCNVKKLINEKKEDGKVFWQNLAGYKRQEALRPYLSSENDRKKGKKFARYQLGDLLLHLEKKHGEDWGKVYDEAWERIDKKVEGLSKHIKLEEERRSEDAQSKAALTDWLRAKASFVIEGLKEADKDEFCRCELKLQKWYGDLRGKPFAIEAENSILDISGFSKQYNCAFIWQKDGVKKLNLYLIINYFKGGKLRFKKIKPEAFEANRFYTVINKKSGEIVPMEVNFNFDDPNLIILPLAFGKRQGREFIWNDLLSLETGSLKLANGRVIEKTLYNRRTRQDEPALFVALTFERREVLDSSNIKPMNLIGVDRGENIPAVIALTDPEGCPLSRFKDSLGNPTHILRIGESYKEKQRTIQAKKEVEQRRAGGYSRKYASKAKNLADDMVRNTARDLLYYAVTQDAMLIFENLSRGFGRQGKRTFMAERQYTRMEDWLTAKLAYEGLSKTLLSKTLAQYTSKTCSNCGFTITSADYDRVLEKLKKTATGWMTTINGKELKVEGQITYYNRRKRQNVVKDLSVELDRLSEESVNNDISSWTKGRSGEALSLLKKRFSHRPVQEKFVCLNCGFETHADEQAALNIARSWLFLRSQEYKKYQTNKTTGNTDKRAFVETWQSFYRKKLKEVWKPAV

SEQ ID NO: 588 - protein, 977 aa, Artificial Sequence
  CasX Variant
MQEIKRINKIRRRLVKDSNTKKAGKTGPMKTLLVRVMTPDLRERLENLRKKPENIPQPISNTSRANLNKLLTDYTEMKKAILHVYWEEFQKDPVGLMSRVAQPAPKNIDQRKLIPVKDGNERLTSSGFACSQCCQPLYVYKLEQVNDKGKPHTNYFGRCNVSEHERLILLSPHKPEANDELVTYSLGKFGQRALDFYSIHVTRESNHPVKPLEQIGGNSCASGPVGKALSDACMGAVASFLTKYQDIILEHQKVIKKNEKRLANLKDIASANGLAFPKITLPPQPHTKEGIEAYNNVVAQIVIWVNLNLWQKLKIGRDEAKPLQRLKGFPSFPLVERQANEVDWWDMVCNVKKLINEKKEDGKVFWQNLAGYKRQEALRPYLSSENDRKKGKKFARYQLGDLLKHLEKKHGEDWGKVYDEAWERIDKKVEGLSKHIKLEEERRSEDAQSKAALTDWLRAKASFVIEGLKEADKDEFSRCELKLQKWYGDLRGKPFAIEAENSILDISGFSKQYNCAFIWQKDGVKKLNLYLIINYFKGGKLRFKKIKPEAFEANRFYTVINKKSGEIVPMEVNFNFDDPNLIILPLAFGKRQGREFIWNDLLSLETGSLKLANGRVIEKTLYNRRTRQDEPALFVALTFERREVLDSSNIKPMNLIGVDRGENIPAVIALTDPEGCPLSRFKDSLGNPTHILRIGESYKEKQRTIQAKKEVEQRRAGGYSRKYASKAKNLADDMVRNTARDLLYYAVTQDAMLIFENLSRGFGRQGKRTFMAERQYTRMEDWLTAKLAYEGLSKTLLSKTLAQYTSKTCSNCGFTITSADYDRVLEKLKKTATGWMTTINGKELKVEGQITYYNRRKRQNVVKDLSVELDRLSEESVNNDISSWTKGRSGEALSLLKKRFSHRPVQEKFVCLNCGFETHADEQAALNIARSWLFLRSQEYKKYQTNKTTGNTDKRAFVETWQSFYRKKLKEVWKPAV

SEQ ID NO: 589 - protein, 977 aa, Artificial Sequence
  CasX Variant
MQEIKRINKIRRRLVKDSNTKKAGKTGPMKTLLVRVMTPDLRERLENLRKKPENIPQPISNTSRANLNKLLTDYTEMKKAILHVYWEEFQKDPVGLMSRVAQPAPKNIDQRKLIPVKDGNERLTSSGFACSQCCQPLYVYKLEQVNDKGKPHTNYFGRCNVSEHERLILLSPHKPEANDELVTYSLGKFGQRALDFYSIHVTRESNHPVKPLEQIGGNSCASGPVGKALSDACMGAVASFLTKYQDIILEHQKVIKKNEKRLANLKDIASANGLAFPKITLPPQPHTKEGIEAYNNVVAQIVIWVNLNLWQKLKIGRDEAKPLQRLKGFPSFPLVERQANEVDWWDMVCNVKKLINEKKEDGKVFWQNLAGYKRQEALRPYLSSEEDRKKGKKFARYQFGDLLLHLEKKHGEDWGKVYDEAWERIDKKVEGLSKHIKLEEERRSEDAQSKAALTDWLRAKASFVIEGLKEADKDEFCRCELKLQKWYGDLRGKPFAIEAENSILDISGFSKQYNCAFIWQKDGVKKLNLYLIINYFKGGKLRFKKIKPEAFEANRFYTVINKKSGEIVPMEVNFNFDDPNLIILPLAFGKRQGREFIWNDLLSLETGSLKLANGRVIEKTLYNRRTRQDEPALFVALTFERREVLDSSNIKPMNLIGVDRGENIPAVIALTDPEGCPLSRFKDSLGNPTHILRIGESYKEKQRTIQAKKEVEQRRAGGYSRKYASKAKNLADDMVRNTARDLLYYAVTQDAMLIFENLSRGFGRQGKRTFMAERQYTRMEDWLTAKLAYEGLSKTLLSKTLAQYTSKTCSNCGFTITSADYDRVLEKLKKTATGWMTTINGKELKVEGQITYYNRRKRQNVVKDLSVELDRLSEESVNNDISSWTKGRSGEALSLLKKRFSHRPVQEKFVCLNCGFETHADEQAALNIARSWLFLRSQEYKKYQTNKTTGNTDKRAFVETWQSFYRKKLKEVWKPAV

SEQ ID NO: 590 - protein, 977 aa, Artificial Sequence
  CasX Variant
MQEIKRINKIRRRLVKDSNTKKAGKTGPMKTLLVRVMTPDLRERLENLRKKPENIPQPISNTSRANLNKLLTDYTEMKKAILHVYWEEFQKDPVGLMSRVAQPAPKNIDQRKLIPVKDGNERLTSSGFACSQCCQPLYVYKLEQVNDKGKPHTNYFGRCNVSEHERLILLSPHKPEANDELVTYSLGKFGQRALDFYSIHVTRESNHPVKPLEQIGGNSCASGPVGKALSDACMGAVASFLTKYQDIILEHQKVIKKNEKRLANLKDIASANGLAFPKITLPPQPHTKEGIEAYNNVVAQIVIWVNLNLWQKLKIGRDEAKPLQRLKGFPSFPLVERQANEVDWWDMVCNVKKLINEKKEDGKVFWQNLAGYKRQEALRPYLSSEEDRKKGKKFARYQFGDLLKHLEKKHGEDWGKVYDEAWERIDKKVEGLSKHIKLEEERRSEDAQSKAALTDWLRAKASFVIEGLKEADKDEFCRCELKLQKWYGDLRGKPFAIEAENSILDISGFSKQYNCAFIWQKDGVKKLNLYLIINYFKGGKLRFKKIKPEAFEANRFYTVINKKSGEIVPMEVNFNFDDPNLIILPLAFGKRQGREFIWNDLLSLETGSLKLANGRVIEKTLYNRRTRQDEPALFVALTFERREVLDSSNIKPMNLIGVDRGENIPAVIALTDPEGCPLSRFKDSLGNPTHILRIGESYKEKQRTIQAKKEVEQRRAGGYSRKYASKAKNLADDMVRNTARDLLYYAVTQDAMLIFENLSRGFGRQGKRTFMAERQYTRMEDWLTAKLAYEGLSKTLLSKTLAQYTSKTCSNCGFTITSADYDRVLEKLKKTATGWMTTINGKELKVEGQITYYNRRKRQNVVKDLSVELDRLSEESVNNDISSWTKGRSGEALSLLKKRFSHRPVQEKFVCLNCGFETHADEQAALNIARSWLFLRSQEYKKYQTNKTTGNTDKRAFVETWQSFYRKKLKEVWKPAV

SEQ ID NO: 591 - protein, 977 aa, Artificial Sequence
  CasX Variant
MQEIKRINKIRRRLVKDSNTKKAGKTGPMKTLLVRVMTPDLRERLENLRKKPENIPQPISNTSRANLNKLLTDYTEMKKAILHVYWEEFQKDPVGLMSRVAQPAPKNIDQRKLIPVKDGNERLTSSGFACSQCCQPLYVYKLEQVNDKGKPHTNYFGRCNVSEHERLILLSPHKPEANDELVTYSLGKFGQRALDFYSIHVTRESNHPVKPLEQIGGNSCASGPVGKALSDACMGAVASFLTKYQDIILEHQKVIKKNEKRLANLKDIASANGLAFPKITLPPQPHTKEGIEAYNNVVAQIVIWVNLNLWQKLKIGRDEAKPLQRLKGFPSFPLVERQANEVDWWDMVCNVKKLINEKKEDGKVFWQNLAGYKRQEALRPYLSSENDRKKGKKFARYQFGDLLLHLEKKHGEDWGKVYDEAWERIDKKVEGLSKHIKLEEERRSEDAQSKAALTDWLRAKASFVIEGLKEADKDEFCRCELKLQKWYGDLRGKPFAIEAENSILDISGFSKQYNCAFIWQKDGVKKLNLYLIINYFKGGKLRFKKIKPEAFEANRFYTVINKKSGEIVPMEVNFNFDDPNLIILPLAFGKRQGREFIWNDLLSLETGSLKLANGRVIEKTLYNRRTRQDEPALFVALTFERREVLDSSNIKPMNLIGVDRGENIPAVIALTDPEGCPLSRFKDSLGNPTHILRIGESYKEKQRTIQAKKEVEQRRAGGYSRKYASKAKNLADDMVRNTARDLLYYAVTQDAMLIFENLSRGFGRQGKRTFMAERQYTRMEDWLTAKLAYEGLSKTLLSKTLAQYTSKTCSNCGFTITSADYDRVLEKLKKTATGWMTTINGKELKVEGQITYYNRRKRQNVVKDLSVELDRLSEESVNNDISSWTKGRSGEALSLLKKRFSHRPVQEKFVCLNCGFETHADEQAALNIARSWLFLRSQEYKKYQTNKTTGNTDKRAFVETWQSFYRKKLKEVWKPAV

SEQ ID NO: 592 - protein, 977 aa, Artificial Sequence
  CasX Variant
MQEIKRINKIRRRLVKDSNTKKAGKTGPMKTLLVRVMTPDLRERLENLRKKPENIPQPISNTSRANLNKLLTDYTEMKKAILHVYWEEFQKDPVGLMSRVAQPAPKNIDQRKLIPVKDGNERLTSSGFACSQCCQPLYVYKLEQVNDKGKPHTNYFGRCNVSEHERLILLSPHKPEANDELVTYSLGKFGQRALDFYSIHVTRESNHPVKPLEQIGGNSCASGPVGKALSDACMGAVASFLTKYQDIILEHQKVIKKNEKRLANLKDIASANGLAFPKITLPPQPHTKEGIEAYNNVVAQIVIWVNLNLWQKLKIGRDEAKPLQRLKGFPSFPLVERQANEVDWWDMVCNVKKLINEKKEDGKVFWQNLAGYKRQEALRPYLSSENDRKKGKKFARYQFGDLLKHLEKKHGEDWGKVYDEAWERIDKKVEGLSKHIKLEEERRSEDAQSKAALTDWLRAKASFVIEGLKEADKDEFSRCELKLQKWYGDLRGKPFAIEAENSILDISGFSKQYNCAFIWQKDGVKKLNLYLIINYFKGGKLRFKKIKPEAFEANRFYTVINKKSGEIVPMEVNFNFDDPNLIILPLAFGKRQGREFIWNDLLSLETGSLKLANGRVIEKTLYNRRTRQDEPALFVALTFERREVLDSSNIKPMNLIGVDRGENIPAVIALTDPEGCPLSRFKDSLGNPTHILRIGESYKEKQRTIQAKKEVEQRRAGGYSRKYASKAKNLADDMVRNTARDLLYYAVTQDAMLIFENLSRGFGRQGKRTFMAERQYTRMEDWLTAKLAYEGLSKTLLSKTLAQYTSKTCSNCGFTITSADYDRVLEKLKKTATGWMTTINGKELKVEGQITYYNRRKRQNVVKDLSVELDRLSEESVNNDISSWTKGRSGEALSLLKKRFSHRPVQEKFVCLNCGFETHADEQAALNIARSWLFLRSQEYKKYQTNKTTGNTDKRAFVETWQSFYRKKLKEVWKPAV

SEQ ID NO: 593 - protein, 977 aa, Artificial Sequence
  CasX Variant
MQEIKRINKIRRRLVKDSNTKKAGKTGPMKTLLVRVMTPDLRERLENLRKKPENIPQPISNTSRANLNKLLTDYTEMKKAILHVYWEEFQKDPVGLMSRVAQPAPKNIDQRKLIPVKDGNERLTSSGFACSQCCQPLYVYKLEQVNDKGKPHTNYFGRCNVSEHERLILLSPHKPEANDELVTYSLGKFGQRALDFYSIHVTRESNHPVKPLEQIGGNSCASGPVGKALSDACMGAVASFLTKYQDIILEHQKVIKKNEKRLANLKDIASANGLAFPKITLPPQPHTKEGIEAYNNVVAQIVIWVNLNLWQKLKIGRDEAKPLQRLKGFPSFPLVERQANEVDWWDMVCNVKKLINEKKEDGKVFWQNLAGYKRQEALRPYLSSENDRKKGKKFARYQFGDLLLHLEKKHGEDWGKVYDEAWERIDKKVEGLSKHIKLEEERRSEDAQSKAALTDWLRAKASFVIEGLKEADKDEFCRCELKLQKWYGDLRGKPFAIEAENSILDISGFSKQYNCAFIWQKDGVKKLNLYLIINYFKGGKLRFKKIKPEAFEANRFYTVINKKSGEIVPMEVNFNFDDPNLIILPLAFGKRQGREFIWNDLLSLETGSLKLANGRVIEKTLYNRRTRQDEPALFVALTFERREVLDSSNIKPMNLIGIDRGENIPAVIALTDPEGCPLSRFKDSLGNPTHILRIGESYKEKQRTIQAKKEVEQRRAGGYSRKYASKAKNLADDMVRNTARDLLYYAVTQDAMLIFENLSRGFGRQGKRTFMAERQYTRMEDWLTAKLAYEGLSKTYLSKTLAQYTSKTCSNCGFTITSADYDRVLEKLKKTATGWMTTINGKELKVEGQITYYNRRKRQNVVKDLSVELDRLSEESVNNDISSWTKGRSGEALSLLKKRFSHRPVQEKFVCLNCGFETHADEQAALNIARSWLFLRSQEYKKYQTNKTTGNTDKRAFVETWQSFYRKKLKEVWKPAV

SEQ ID NO: 594 - protein, 977 aa, Artificial Sequence
  CasX Variant
MQEIKRINKIRRRLVKDSNTKKAGKTGPMKTLLVRVMTPDLRERLENLRKKPENIPQPISNTSRANLNKLLTDYTEMKKAILHVYWEEFQKDPVGLMSRVAQPAPKNIDQRKLIPVKDGNERLTSSGFACSQCCQPLYVYKLEQVNDKGKPHTNYFGRCNVSEHERLILLSPHKPEANDELVTYSLGKFGQRALDFYSIHVTRESNHPVKPLEQIGGNSCASGPVGKALSDACMGAVASFLTKYQDIILEHQKVIKKNEKRLANLKDIASANGLAFPKITLPPQPHTKEGIEAYNNVVAQIVIWVNLNLWQKLKIGRDEAKPLQRLKGFPSFPLVERQANEVDWWDMVCNVKKLINEKKEDGKVFWQNLAGYKRQEALRPYLSSENDRKKGKKFARYQFGDLLKHLEKKHGEDWGKVYDEAWERIDKKVEGLSKHIKLEEERRSEDAQSKAALTDWLRAKASFVIEGLKEADKDEFCRCELKLQKWYGDLRGKPFAIEAENSILDISGFSKQYNCAFIWQKDGVKKLNLYLIINYFKGGKLRFKKIKPEAFEANRFYTVINKKSGEIVPMEVNFNFDDPNLIILPLAFGKRQGREFIWNDLLSLETGSLKLANGRVIEKTLYNRRTRQDEPALFVALTFERREVLDSSNIKPMNLIGIDRGENIPAVIALTDPEGCPLSRFKDSLGNPTHILRIGESYKEKQRTIQAKKEVEQRRAGGYSRKYASKAKNLADDMVRNTARDLLYYAVTQDAMLIFENLSRGFGRQGKRTFMAERQYTRMEDWLTAKLAYEGLSKTYLSKTLAQYTSKTCSNCGFTITSADYDRVLEKLKKTATGWMTTINGKELKVEGQITYYNRRKRQNVVKDLSVELDRLSEESVNNDISSWTKGRSGEALSLLKKRFSHRPVQEKFVCLNCGFETHADEQAALNIARSWLFLRSQEYKKYQTNKTTGNTDKRAFVETWQSFYRKKLKEVWKPAV

SEQ ID NO: 595 - protein, 977 aa, Artificial Sequence
  CasX Variant
MQEIKRINKIRRRLVKDSNTKKAGKTGPMKTLLVRVMTPDLRERLENLRKKPENIPQPISNTSRANLNKLLTDYTEMKKAILHVYWEEFQKDPVGLMSRVAQPAPKNIDQRKLIPVKDGNERLTSSGFACSQCCQPLYVYKLEQVNDKGKPHTNYFGRCNVSEHERLILLSPHKPEANDELVTYSLGKFGQRALDFYSIHVTRESNHPVKPLEQIGGNSCASGPVGKALSDACMGAVASFLTKYQDIILEHQKVIKKNEKRLANLKDIASANGLAFPKITLPPQPHTKEGIEAYNNVVAQIVIWVNLNLWQKLKIGRDEAKPLQRLKGFPSFPLVERQANEVDWWDMVCNVKKLINEKKEDGKVFWQNLAGYKRQEALRPYLSSPEDRKKGKKFARYQFGDLLLHLEKKHGEDWGKVYDEAWERIDKKVEGLSKHIKLEEERRSEDAQSKAALTDWLRAKASFVIEGLKEADKDEFCRCELKLQKWYGDLRGKPFAIEAENSILDISGFSKQYNCAFIWQKDGVKKLNLYLIINYFKGGKLRFKKIKPEAFEANRFYTVINKKSGEIVPMEVNFNFDDPNLIILPLAFGKRQGREFIWNDLLSLETGSLKLANGRVIEKTLYNRRTRQDEPALFVALTFERREVLDSSNIKPMNLIGIDRGENIPAVIALTDPEGCPLSRFKDSLGNPTHILRIGESYKEKQRTIQAKKEVEQRRAGGYSRKYASKAKNLANDMVRNTARDLLYYAVTQDAMLIFENLSRGFGRQGKRTFMAERQYTRMEDWLTAKLAYEGLSKTYLSKTLAQYTSKTCSNCGFTITSADYDRVLEKLKKTATGWMTTINGKELKVEGQITYYNRRKRQNVVKDLSVELDRLSEESVNNDISSWTKGRSGEALSLLKKRFSHRPVQEKFVCLNCGFETHADEQAALNIARSWLFLRSQEYKKYQTNKTTGNTDKRAFVETWQSFYRKKLKEVWKPAV

SEQ ID NO: 596 - protein, 977 aa, Artificial Sequence
  CasX Variant
MQEIKRINKIRRRLVKDSNTKKAGKTGPMKTLLVRVMTPDLRERLENLRKKPENIPQPISNTSRANLNKLLTDYTEMKKAILHVYWEEFQKDPVGLMSRVAQPAPKNIDQRKLIPVKDGNERLTSSGFACSQCCQPLYVYKLEQVNDKGKPHTNYFGRCNVSEHERLILLSPHKPEANDELVTYSLGKFGQRALDFYSIHVTRESNHPVKPLEQIGGNSCASGPVGKALSDACMGAVASFLTKYQDIILEHQKVIKKNEKRLANLKDIASANGLAFPKITLPPQPHTKEGIEAYNNVVAQIVIWVNLNLWQKLKIGRDEAKPLQRLKGFPSFPLVERQANEVDWWDMVCNVKKLINEKKEDGKVFWQNLAGYKRQEALRPYLSSPEDRKKGKKFARYQFGDLLLHLEKKHGEDWGKVYDEAWERIDKKVEGLSKHIKLEEERRSEDAQSKAALTDWLRAKASFVIEGLKEADKDEFCRCELKLQKWYGDLRGKPFAIEAENSILDISGFSKQYNCAFIWQKDGVKKLNLYLIINYFKGGKLRFKKIKPEAFEANRFYTVINKKSGEIVPMEVNFNFDDPNLIILPLAFGKRQGREFIWNDLLSLETGSLKLANGRVIEKTLYNRRTRQDEPALFVALTFERREVLDSSNIKPMNLIGVDRGENIPAVIALTDPEGCPLSRFKDSLGNPTHILRIGESYKEKQRTIQAKKEVEQRRAGGYSRKYASKAKNLANDMVRNTARDLLYYAVTQDAMLIFENLSRGFGRQGKRTFMAERQYTRMEDWLTAKLAYEGLSKTYLSKTLAQYTSKTCSNCGFTITSADYDRVLEKLKKTATGWMTTINGKELKVEGQITYYNRRKRQNVVKDLSVELDRLSEESVNNDISSWTKGRSGEALSLLKKRFSHRPVQEKFVCLNCGFETHADEQAALNIARSWLFLRSQEYKKYQTNKTTGNTDKRAFVETWQSFYRKKLKEVWKPAV

SEQ ID NO: 597 - protein, 977 aa, Artificial Sequence
  CasX Variant
MQEIKRINKIRRRLVKDSNTKKAGKTGPMKTLLVRVMTPDLRERLENLRKKPENIPQPISNTSRANLNKLLTDYTEMKKAILHVYWEEFQKDPVGLMSRVAQPAPKNIDQRKLIPVKDGNERLTSSGFACSQCCQPLYVYKLEQVNDKGKPHTNYFGRCNVSEHERLILLSPHKPEANDELVTYSLGKFGQRALDFYSIHVTRESNHPVKPLEQIGGNSCASGPVGKALSDACMGAVASFLTKYQDIILEHQKVIKKNEKRLANLKDIASANGLAFPKITLPPQPHTKEGIEAYNNVVAQIVIWVNLNLWQKLKIGRDEAKPLQRLKGFPSFPLVERQANEVDWWDMVCNVKKLINEKKEDGKVFWQNLAGYKRQEALRPYLSSPEDRKKGKKFARYQLGDLLLHLEKKHGEDWGKVYDEAWERIDKKVEGLSKHIKLEEERRSEDAQSKAALTDWLRAKASFVIEGLKEADKDEFCRCELKLQKWYGDLRGKPFAIEAENSILDISGFSKQYNCAFIWQKDGVKKLNLYLIINYFKGGKLRFKKIKPEAFEANRFYTVINKKSGEIVPMEVNFNFDDPNLIILPLAFGKRQGREFIWNDLLSLETGSLKLANGRVIEKTLYNRRTRQDEPALFVALTFERREVLDSSNIKPMNLIGVDRGENIPAVIALTDPEGCPLSRFKDSLGNPTHILRIGESYKEKQRTIQAKKEVEQRRAGGYSRKYASKAKNLANDMVRNTARDLLYYAVTQDAMLIFENLSRGFGRQGKRTFMAERQYTRMEDWLTAKLAYEGLSKTYLSKTLAQYTSKTCSNCGFTITSADYDRVLEKLKKTATGWMTTINGKELKVEGQITYYNRRKRQNVVKDLSVELDRLSEESVNNDISSWTKGRSGEALSLLKKRFSHRPVQEKFVCLNCGFETHADEQAALNIARSWLFLRSQEYKKYQTNKTTGNTDKRAFVETWQSFYRKKLKEVWKPAV

SEQ ID NO: 598 - protein, 977 aa, Artificial Sequence
  CasX Variant
MQEIKRINKIRRRLVKDSNTKKAGKTGPMKTLLVRVMTPDLRERLENLRKKPENIPQPISNTSRANLNKLLTDYTEMKKAILHVYWEEFQKDPVGLMSRVAQPAPKNIDQRKLIPVKDGNERLTSSGFACSQCCQPLYVYKLEQVNDKGKPHTNYFGRCNVSEHERLILLSPHKPEANDELVTYSLGKFGQRALDFYSIHVTRESNHPVKPLEQIGGNSCASGPVGKALSDACMGAVASFLTKYQDIILEHQKVIKKNEKRLANLKDIASANGLAFPKITLPPQPHTKEGIEAYNNVVAQIVIWVNLNLWQKLKIGRDEAKPLQRLKGFPSFPLVERQANEVDWWDMVCNVKKLINEKKEDGKVFWQNLAGYKRQEALRPYLSSPNDRKKGKKFARYQFGDLLLHLEKKHGEDWGKVYDEAWERIDKKVEGLSKHIKLEEERRSEDAQSKAALTDWLRAKASFVIEGLKEADKDEFCRCELKLQKWYGDLRGKPFAIEAENSILDISGFSKQYNCAFIWQKDGVKKLNLYLIINYFKGGKLRFKKIKPEAFEANRFYTVINKKSGEIVPMEVNFNFDDPNLIILPLAFGKRQGREFIWNDLLSLETGSLKLANGRVIEKTLYNRRTRQDEPALFVALTFERREVLDSSNIKPMNLIGVDRGENIPAVIALTDPEGCPLSRFKDSLGNPTHILRIGESYKEKQRTIQAKKEVEQRRAGGYSRKYASKAKNLANDMVRNTARDLLYYAVTQDAMLIFENLSRGFGRQGKRTFMAERQYTRMEDWLTAKLAYEGLSKTYLSKTLAQYTSKTCSNCGFTITSADYDRVLEKLKKTATGWMTTINGKELKVEGQITYYNRRKRQNVVKDLSVELDRLSEESVNNDISSWTKGRSGEALSLLKKRFSHRPVQEKFVCLNCGFETHADEQAALNIARSWLFLRSQEYKKYQTNKTTGNTDKRAFVETWQSFYRKKLKEVWKPAV

SEQ ID NO: 599 - protein, 977 aa, Artificial Sequence
  CasX Variant
MQEIKRINKIRRRLVKDSNTKKAGKTGPMKTLLVRVMTPDLRERLENLRKKPENIPQPISNTSRANLNKLLTDYTEMKKAILHVYWEEFQKDPVGLMSRVAQPAPKNIDQRKLIPVKDGNERLTSSGFACSQCCQPLYVYKLEQVNDKGKPHTNYFGRCNVSEHERLILLSPHKPEANDELVTYSLGKFGQRALDFYSIHVTRESNHPVKPLEQIGGNSCASGPVGKALSDACMGAVASFLTKYQDIILEHQKVIKKNEKRLANLKDIASANGLAFPKITLPPQPHTKEGIEAYNNVVAQIVIWVNLNLWQKLKIGRDEAKPLQRLKGFPSFPLVERQANEVDWWDMVCNVKKLINEKKEDGKVFWQNLAGYKRQEALRPYLSSPEDRKKGKKFARYQFGDLLKHLEKKHGEDWGKVYDEAWERIDKKVEGLSKHIKLEEERRSEDAQSKAALTDWLRAKASFVIEGLKEADKDEFCRCELKLQKWYGDLRGKPFAIEAENSILDISGFSKQYNCAFIWQKDGVKKLNLYLIINYFKGGKLRFKKIKPEAFEANRFYTVINKKSGEIVPMEVNFNFDDPNLIILPLAFGKRQGREFIWNDLLSLETGSLKLANGRVIEKTLYNRRTRQDEPALFVALTFERREVLDSSNIKPMNLIGVDRGENIPAVIALTDPEGCPLSRFKDSLGNPTHILRIGESYKEKQRTIQAKKEVEQRRAGGYSRKYASKAKNLANDMVRNTARDLLYYAVTQDAMLIFENLSRGFGRQGKRTFMAERQYTRMEDWLTAKLAYEGLSKTYLSKTLAQYTSKTCSNCGFTITSADYDRVLEKLKKTATGWMTTINGKELKVEGQITYYNRRKRQNVVKDLSVELDRLSEESVNNDISSWTKGRSGEALSLLKKRFSHRPVQEKFVCLNCGFETHADEQAALNIARSWLFLRSQEYKKYQTNKTTGNTDKRAFVETWQSFYRKKLKEVWKPAV

SEQ ID NO: 600 - protein, 977 aa, Artificial Sequence
  CasX Variant
MQEIKRINKIRRRLVKDSNTKKAGKTGPMKTLLVRVMTPDLRERLENLRKKPENIPQPISNTSRANLNKLLTDYTEMKKAILHVYWEEFQKDPVGLMSRVAQPAPKNIDQRKLIPVKDGNERLTSSGFACSQCCQPLYVYKLEQVNDKGKPHTNYFGRCNVSEHERLILLSPHKPEANDELVTYSLGKFGQRALDFYSIHVTRESNHPVKPLEQIGGNSCASGPVGKALSDACMGAVASFLTKYQDIILEHKKVIKKNEKRLANLKDIASANGLAFPKITLPPQPHTKEGIEAYNNVVAQIVIWVNLNLWQKLKIGRDEAKPLQRLKGFPSFPLVERQANEVDWWDMVCNVKKLINEKKEDGKVFWQNLAGYKRQEALRPYLSSPEDRKKGKKFARYQFGDLLLHLEKKHGEDWGKVYDEAWERIDKKVEGLSKHIKLEEERRSEDAQSKAALTDWLRAKASFVIEGLKEADKDEFCRCELKLQKWYGDLRGKPFAIEAENSILDISGFSKQYNCAFIWQKDGVKKLNLYLIINYFKGGKLRFKKIKPEAFEANRFYTVINKKSGEIVPMEVNFNFDDPNLIILPLAFGKRQGREFIWNDLLSLETGSLKLANGRVIEKPLYNRRTRQDEPALFVALTFERREVLDSSNIKPMNLIGIDRGENIPAVIALTDPEGCPLSRFKDSLGNPTHILRIGESYKEKQRTIQAKKEVEQRRAGGYSRKYASKAKNLADDMVRNTARDLLYYAVTQDAMLIFENLSRGFGRQGKRTFMAERQYTRMEDWLTAKLAYEGLSKTYLSKTLAQYTSKTCSNCGFTITSADYDRVLEKLKKTATGWMTTINGKELKVEGQITYYNRRKRQNVVKDLSVELDRLSEESVNNDISSWTKGRSGEALSLLKKRFSHRPVQEKFVCLNCGFETHADEQAALNIARSWLFLRSQEYKKYQTNKTTGNTDKRAFVETWQSFYRKKLKEVWKPAV

SEQ ID NO: 601 - protein, 977 aa, Artificial Sequence
  CasX Variant
MQEIKRINKIRRRLVKDSNTKKAGKTGPMKTLLVRVMTPDLRERLENLRKKPENIPQPISNTSRANLNKLLTDYTEMKKAILHVYWEEFQKDPVGLMSRVAQPAPKNIDQRKLIPVKDGNERLTSSGFACSQCCQPLYVYKLEQVNDKGKPHTNYFGRCNVSEHERLILLSPHKPEANDELVTYSLGKFGQRALDFYSIHVTRESNHPVKPLEQIGGNSCASGPVGKALSDACMGAVASFLTKYQDIILEHKKVIKKNEKRLANLKDIASANGLAFPKITLPPQPHTKEGIEAYNNVVAQIVIWVNLNLWQKLKIGRDEAKPLQRLKGFPSFPLVERQANEVDWWDMVCNVKKLINEKKEDGKVFWQNLAGYKRQEALRPYLSSPEDRKKGKKFARYQFGDLLLHLEKKHGEDWGKVYDEAWERIDKKVEGLSKHIKLEEERRSEDAQSKAALTDWLRAKASFVIEGLKEADKDEFCRCELKLQKWYGDLRGKPFAIEAENSILDISGFSKQYNCAFIWQKDGVKKLNLYLIINYFKGGKLRFKKIKPEAFEANRFYTVINKKSGEIVPMEVNFNFDDPNLIILPLAFGKRQGREFIWNDLLSLETGSLKLANGRVIEKPLYNRRTRQDEPALFVALTFERREVLDSSNIKPMNLIGVDRGENIPAVIALTDPEGCPLSRFKDSLGNPTHILRIGESYKEKQRTIQAKKEVEQRRAGGYSRKYASKAKNLADDMVRNTARDLLYYAVTQDAMLIFENLSRGFGRQGKRTFMAERQYTRMEDWLTAKLAYEGLSKTYLSKTLAQYTSKTCSNCGFTITSADYDRVLEKLKKTATGWMTTINGKELKVEGQITYYNRRKRQNVVKDLSVELDRLSEESVNNDISSWTKGRSGEALSLLKKRFSHRPVQEKFVCLNCGFETHADEQAALNIARSWLFLRSQEYKKYQTNKTTGNTDKRAFVETWQSFYRKKLKEVWKPAV

SEQ ID NO: 602 - protein, 977 aa, Artificial Sequence
  CasX Variant
MQEIKRINKIRRRLVKDSNTKKAGKTGPMKTLLVRVMTPDLRERLENLRKKPENIPQPISNTSRANLNKLLTDYTEMKKAILHVYWEEFQKDPVGLMSRVAQPAPKNIDQRKLIPVKDGNERLTSSGFACSQCCQPLYVYKLEQVNDKGKPHTNYFGRCNVSEHERLILLSPHKPEANDELVTYSLGKFGQRALDFYSIHVTRESNHPVKPLEQIGGNSCASGPVGKALSDACMGAVASFLTKYQDIILEHKKVIKKNEKRLANLKDIASANGLAFPKITLPPQPHTKEGIEAYNNVVAQIVIWVNLNLWQKLKIGRDEAKPLQRLKGFPSFPLVERQANEVDWWDMVCNVKKLINEKKEDGKVFWQNLAGYKRQEALRPYLSSPNDRKKGKKFARYQFGDLLLHLEKKHGEDWGKVYDEAWERIDKKVEGLSKHIKLEEERRSEDAQSKAALTDWLRAKASFVIEGLKEADKDEFCRCELKLQKWYGDLRGKPFAIEAENSILDISGFSKQYNCAFIWQKDGVKKLNLYLIINYFKGGKLRFKKIKPEAFEANRFYTVINKKSGEIVPMEVNFNFDDPNLIILPLAFGKRQGREFIWNDLLSLETGSLKLANGRVIEKPLYNRRTRQDEPALFVALTFERREVLDSSNIKPMNLIGVDRGENIPAVIALTDPEGCPLSRFKDSLGNPTHILRIGESYKEKQRTIQAKKEVEQRRAGGYSRKYASKAKNLADDMVRNTARDLLYYAVTQDAMLIFENLSRGFGRQGKRTFMAERQYTRMEDWLTAKLAYEGLSKTYLSKTLAQYTSKTCSNCGFTITSADYDRVLEKLKKTATGWMTTINGKELKVEGQITYYNRRKRQNVVKDLSVELDRLSEESVNNDISSWTKGRSGEALSLLKKRFSHRPVQEKFVCLNCGFETHADEQAALNIARSWLFLRSQEYKKYQTNKTTGNTDKRAFVETWQSFYRKKLKEVWKPAV

SEQ ID NO: 603 - protein, 977 aa, Artificial Sequence
  CasX Variant
MQEIKRINKIRRRLVKDSNTKKAGKTGPMKTLLVRVMTPDLRERLENLRKKPENIPQPISNTSRANLNKLLTDYTEMKKAILHVYWEEFQKDPVGLMSRVAQPAPKNIDQRKLIPVKDGNERLTSSGFACSQCCQPLYVYKLEQVNDKGKPHTNYFGRCNVSEHERLILLSPHKPEANDELVTYSLGKFGQRALDFYSIHVTRESNHPVKPLEQIGGNSCASGPVGKALSDACMGAVASFLTKYQDIILEHKKVIKKNEKRLANLKDIASANGLAFPKITLPPQPHTKEGIEAYNNVVAQIVIWVNLNLWQKLKIGRDEAKPLQRLKGFPSFPLVERQANEVDWWDMVCNVKKLINEKKEDGKVFWQNLAGYKRQEALRPYLSSPEDRKKGKKFARYQLGDLLLHLEKKHGEDWGKVYDEAWERIDKKVEGLSKHIKLEEERRSEDAQSKAALTDWLRAKASFVIEGLKEADKDEFCRCELKLQKWYGDLRGKPFAIEAENSILDISGFSKQYNCAFIWQKDGVKKLNLYLIINYFKGGKLRFKKIKPEAFEANRFYTVINKKSGEIVPMEVNFNFDDPNLIILPLAFGKRQGREFIWNDLLSLETGSLKLANGRVIEKPLYNRRTRQDEPALFVALTFERREVLDSSNIKPMNLIGVDRGENIPAVIALTDPEGCPLSRFKDSLGNPTHILRIGESYKEKQRTIQAKKEVEQRRAGGYSRKYASKAKNLADDMVRNTARDLLYYAVTQDAMLIFENLSRGFGRQGKRTFMAERQYTRMEDWLTAKLAYEGLSKTYLSKTLAQYTSKTCSNCGFTITSADYDRVLEKLKKTATGWMTTINGKELKVEGQITYYNRRKRQNVVKDLSVELDRLSEESVNNDISSWTKGRSGEALSLLKKRFSHRPVQEKFVCLNCGFETHADEQAALNIARSWLFLRSQEYKKYQTNKTTGNTDKRAFVETWQSFYRKKLKEVWKPAV

SEQ ID NO: 604 - protein, 977 aa, Artificial Sequence
  CasX Variant
MQEIKRINKIRRRLVKDSNTKKAGKTGPMKTLLVRVMTPDLRERLENLRKKPENIPQPISNTSRANLNKLLTDYTEMKKAILHVYWEEFQKDPVGLMSRVAQPAPKNIDQRKLIPVKDGNERLTSSGFACSQCCQPLYVYKLEQVNDKGKPHTNYFGRCNVSEHERLILLSPHKPEANDELVTYSLGKFGQRALDFYSIHVTRESNHPVKPLEQIGGNSCASGPVGKALSDACMGAVASFLTKYQDIILEHKKVIKKNEKRLANLKDIASANGLAFPKITLPPQPHTKEGIEAYNNVVAQIVIWVNLNLWQKLKIGRDEAKPLQRLKGFPSFPLVERQANEVDWWDMVCNVKKLINEKKEDGKVFWQNLAGYKRQEALRPYLSSPEDRKKGKKFARYQFGDLLKHLEKKHGEDWGKVYDEAWERIDKKVEGLSKHIKLEEERRSEDAQSKAALTDWLRAKASFVIEGLKEADKDEFCRCELKLQKWYGDLRGKPFAIEAENSILDISGFSKQYNCAFIWQKDGVKKLNLYLIINYFKGGKLRFKKIKPEAFEANRFYTVINKKSGEIVPMEVNFNFDDPNLIILPLAFGKRQGREFIWNDLLSLETGSLKLANGRVIEKPLYNRRTRQDEPALFVALTFERREVLDSSNIKPMNLIGVDRGENIPAVIALTDPEGCPLSRFKDSLGNPTHILRIGESYKEKQRTIQAKKEVEQRRAGGYSRKYASKAKNLADDMVRNTARDLLYYAVTQDAMLIFENLSRGFGRQGKRTFMAERQYTRMEDWLTAKLAYEGLSKTYLSKTLAQYTSKTCSNCGFTITSADYDRVLEKLKKTATGWMTTINGKELKVEGQITYYNRRKRQNVVKDLSVELDRLSEESVNNDISSWTKGRSGEALSLLKKRFSHRPVQEKFVCLNCGFETHADEQAALNIARSWLFLRSQEYKKYQTNKTTGNTDKRAFVETWQSFYRKKLKEVWKPAV

SEQ ID NO: 605 - protein, 977 aa, Artificial Sequence
  CasX Variant
MQEIKRINKIRRRLVKDSNTKKAGKTGPMKTLLVRVMTPDLRERLENLRKKPENIPQPISNTSRANLNKLLTDYTEMKKAILHVYWEEFQKDPVGLMSRVAQPAPKNIDQRKLIPVKDGNERLTSSGFACSQCCQPLYVYKLEQVNDKGKPHTNYFGRCNVSEHERLILLSPHKPEANDELVTYSLGKFGQRALDFYSIHVTRESNHPVKPLEQIGGNSCASGPVGKALSDACMGAVASFLTKYQDIILEHQKVIKKNEKRLANLKDIASANGLAFPKITLPPQPHTKEGIEAYNNVVAQIVIWVNLNLWQKLKIGRDEAKPLQRLKGFPSFPLVERQANEVDWWDMVCNVKKLINEKKEDGKVFWQNLAGYKRQEALRPYLSSENDRKKGKKFARYQFGDLLLHLEKKHGEDWGKVYDEAWERIDKKVEGLSKHIKLEEERRSEDAQSKAALTDWLRAKASFVIEGLKEADKDEFCRCELKLQKWYGDLRGKPFAIEAENSILDISGFSKQYNCAFIWQKDGVKKLNLYLIINYFKGGKLRFKKIKPEAFEANRFYTVINKKSGEIVPMEVNFNFDDPNLIILPLAFGKRQGREFIWNDLLSLETGSLKLANGRVIEKPLYNRRTRQDEPALFVALTFERREVLDSSNIKPMNLIGVDRGENIPAVIALTDPEGCPLSRFKDSLGNPTHILRIGESYKEKQRTIQAKKEVEQRRAGGYSRKYASKAKNLADDMVRNTARDLLYYAVTQDAMLIFENLSRGFGRQGKRTFMAERQYTRMEDWLTAKLAYEGLSKTYLSKTLAQYTSKTCSNCGFTITSADYDRVLEKLKKTATGWMTTINGKELKVEGQITYYNRRKRQNVVKDLSVELDRLSEESVNNDISSWTKGRSGEALSLLKKRFSHRPVQEKFVCLNCGFETHADEQAALNIARSWLFLRSQEYKKYQTNKTTGNTDKRAFVETWQSFYRKKLKEVWKPAV

SEQ ID NO: 606 - protein, 977 aa, Artificial Sequence
  CasX Variant
MQEIKRINKIRRRLVKDSNTKKAGKTGPMKTLLVRVMTPDLRERLENLRKKPENIPQPISNTSRANLNKLLTDYTEMKKAILHVYWEEFQKDPVGLMSRVAQPAPKNIDQRKLIPVKDGNERLTSSGFACSQCCQPLYVYKLEQVNDKGKPHTNYFGRCNVSEHERLILLSPHKPEANDELVTYSLGKFGQRALDFYSIHVTRESNHPVKPLEQIGGNSCASGPVGKALSDACMGAVASFLTKYQDIILEHKKVIKKNEKRLANLKDIASANGLAFPKITLPPQPHTKEGIEAYNNVVAQIVIWVNLNLWQKLKIGRDEAKPLQRLKGFPSFPLVERQANEVDWWDMVCNVKKLINEKKEDGKVFWQNLAGYKRQEALRPYLSSPEDRKKGKKFARYQFGDLLLHLEKKHGEDWGKVYDEAWERIDKKVEGLSKHIKLEEERRSEDAQSKAALTDWLRAKASFVIEGLKEADKDEFCRCELKLQKWYGDLRGKPFAIEAENSILDISGFSKQYNCAFIWQKDGVKKLNLYLIINYFKGGKLRFKKIKPEAFEANRFYTVINKKSGEIVPMEVNFNFDDPNLIILPLAFGKRQGREFIWNDLLSLETGSLKLANGRVIEKPLYNRRTRQDEPALFVALTFERREVLDSSNIKPMNLIGIDRGENIPAVIALTDPEGCPLSRFKDSLGNPTHILRIGESYKEKQRTIQAKKEVEQRRAGGYSRKYASKAKNLADDMVRNTARDLLYYAVTQDAMLIFENLSRGFGRQGKRTFMAERQYTRMEDWLTAKLAYEGLSKTYLSKTLAQYTSKTCSNCGFTITSADYDRVLEKLKKTATGWMTTINGKELKVEGQITYYNRYKRQNVVKDLSVELDRLSEESVNNDISSWTKGRSGEALSLLKKRFSHRPVQEKFVCLNCGFETHADEQAALNIARSWLFLRSQEYKKYQTNKTTGNTDKRAFVETWQSFYRKKLKEVWKPAV

SEQ ID NO: 607 - protein, 976 aa, Artificial Sequence
  CasX Variant
QEIKRINKIRRRLVKDSNTKKAGKTGPMKTLLVRVMTPDLRERLENLRKKPENIPQPISNTSRANLNKLLTDYTEMKKAILHVYWEEFQKDPVGLMSRVAQPAPKNIDQRKLIPVKDGNERLTSSGFACSQCCQPLYVYKLEQVNDKGKPHTNYFGRCNVSEHERLILLSPHKPEANDELVTYSLGKFGQRALDFYSIHVTRESNHPVKPLEQIGGNSCASGPVGKALSDACMGAVASFLTKYQDIILEHQKVIKKNEKRLANLKDIASANGLAFPKITLPPQPHTKEGIEAYNNVVAQIVIWVNLNLWQKLKIGRDEAKPLQRLKGFPSFPLVERQANEVDWWDMVCNVKKLINEKKEDGKVFWQNLAGYKRQEALRPYLSSEEDRKKGKKFARYQFGDLLLHLEKKHGEDWGKVYDEAWERIDKKVEGLSKHIKLEEERRSEDAQSKAALTDWLRAKASFVIEGLKEADKDEFCRCELKLQKWYGDLRGKPFAIEAENSILDISGFSKQYNCAFIWQKDGVKKLNLYLIINYFKGGKLRFKKIKPEAFEANRFYTVINKKSGEIVPMEVNFNFDDPNLIILPLAFGKRQGREFIWNDLLSLETGSLKLANGRVIEKTLYNRRTRQDEPALFVALTFERREVLDSSNIKPMNLIGIDRGENIPAVIALTDPEGCPLSRFKDSLGNPTHILRIGESYKEKQRTIQAKKEVEQRRAGGYSRKYASKAKNLADDMVRNTARDLLYYAVTQDAMLIFENLSRGFGRQGKRTFMAERQYTRMEDWLTAKLAYEGLSKTYLSKTLAQYTSKTCSNCGFTITSADYDRVLEKLKKTATGWMTTINGKELKVEGQITYYNRYKRQNVVKDLSVELDRLSEESVNNDISSWTKGRSGEALSLLKKRFSHRPVQEKFVCLNCGFETHADEQAALNIARSWLFLRSQEYKKYQTNKTTGNTDKRAFVETWQSFYRKKLKEVWKPAV

SEQ ID NO: 608 - protein, 977 aa, Artificial Sequence; identical to SEQ ID NO: 574
  CasX Variant

SEQ ID NO: 609 - protein, 977 aa, Artificial Sequence; identical to SEQ ID NO: 574
  CasX Variant

SEQ ID NO: 610 - protein, 977 aa, Artificial Sequence; identical to SEQ ID NO: 574
  CasX Variant

SEQ ID NO: 611 - protein, 977 aa, Artificial Sequence; identical to SEQ ID NO: 574
  CasX Variant

SEQ ID NO: 612 - protein, 977 aa, Artificial Sequence; identical to SEQ ID NO: 574
  CasX Variant

SEQ ID NO: 613 - protein, 978 aa, Artificial Sequence
  CasX Variant
MQEIKRINKIRRRLVKDSNTKKAGKTGPMKTLLVRVMTPDLRERLENLRKKPENIPQPISNTSRANLNKLLTDYTEMKKAILHVYWEEFQKDPVGLMSRVAQPAPKNIDQRKLIPVKDGNERLTMSSGFACSQCCQPLYVYKLEQVNDKGKPHTNYFGRCNVSEHERLILLSPHKPEANDELVTYSLGKFGQRALDFYSIHVTRESNHPVKPLEQIGGNSCASGPVGKALSDACMGAVASFLTKYQDIILEHQKVIKKNEKRLANLKDIASANGLAFPKITLPPQPHTKEGIEAYNNVVAQIVIWVNLNLWQKLKIGRDEAKPLQRLKGFPSFPLVERQANEVDWWDMVCNVKKLINEKKEDGKVFWQNLAGYKRQEALRPYLSSEEDRKKGKKFARYQFGDLLLHLEKKHGEDWGKVYDEAWERIDKKVEGLSKHIKLEEERRSEDAQSKAALTDWLRAKASFVIEGLKEADKDEFCRCELKLQKWYGDLRGKPFAIEAENSILDISGFSKQYNCAFIWQKDGVKKLNLYLIINYFKGGKLRFKKIKPEAFEANRFYTVINKKSGEIVPMEVNFNFDDPNLIILPLAFGKRQGREFIWNDLLSLETGSLKLANGRVIEKTLYNRRTRQDEPALFVALTFERREVLDSSNIKPMNLIGIDRGENIPAVIALTDPEGCPLSRFKDSLGNPTHILRIGESYKEKQRTIQAKKEVEQRRAGGYSRKYASKAKNLADDMVRNTARDLLYYAVTQDAMLIFENLSRGFGRQGKRTFMAERQYTRMEDWLTAKLAYEGLSKTYLSKTLAQYTSKTCSNCGFTITSADYDRVLEKLKKTATGWMTTINGKELKVEGQITYYNRYKRQNVVKDLSVELDRLSEESVNNDISSWTKGRSGEALSLLKKRFSHRPVQEKFVCLNCGFETHADEQAALNIARSWLFLRSQEYKKYQTNKTTGNTDKRAFVETWQSFYRKKLKEVWKPAV

SEQ ID NO: 614 - protein, 977 aa, Artificial Sequence; identical to SEQ ID NO: 574
  CasX Variant

SEQ ID NO: 615 - protein, 977 aa, Artificial Sequence; identical to SEQ ID NO: 574
  CasX Variant

SEQ ID NO: 616 - protein, 977 aa, Artificial Sequence; identical to SEQ ID NO: 574
  CasX Variant

SEQ ID NO: 617 - protein, 977 aa, Artificial Sequence; identical to SEQ ID NO: 574
  CasX Variant

SEQ ID NO: 618 - protein, 977 aa, Artificial Sequence; identical to SEQ ID NO: 574
  CasX Variant

SEQ ID NO: 619 - protein, 977 aa, Artificial Sequence; identical to SEQ ID NO: 574
  CasX Variant

SEQ ID NO: 620 - protein, 977 aa, Artificial Sequence
  CasX Variant
QEIKRINKIRRRLVKDSNTKKAGKTGPMKTLLVRVMTPDLRERLENLRKKPENIPQPISNTSRANLNKLLTDYTEMKKAILHVYWEEFQKDPVGLMSRVAQPASKKIDQNKLKPEMDEKGNLTTAGFACSQCGQPLFVYKLEQVSEKGKAYTNYFGRCNVAEHEKLILLAQLKPEKDSDEAVTYSLGKFGQRALDFYSIHVTRESNHPVKPLEQIGGNSCASGPVGKALSDACMGAVASFLTKYQDIILEHQKVIKKNEKRLANLKDIASANGLAFPKITLPPQPHTKEGIEAYNNVVAQIVIWVNLNLWQKLKIGRDEAKPLQRLKGFPSFPLVERQANEVDWWDMVCNVKKLINEKKEDGKVFWQNLAGYKRQEALRPYLSSEEDRKKGKKFARYQFGDLLLHLEKKHGEDWGKVYDEAWERIDKKVEGLSKHIKLEEERRSEDAQSKAALTDWLRAKASFVIEGLKEADKDEFCRCELKLQKWYGDLRGKPFAIEAENSILDISGFSKQYNCAFIWQKDGVKKLNLYLIINYFKGGKLRFKKIKPEAFEANRFYTVINKKSGEIVPMEVNFNFDDPNLIILPLAFGKRQGREFIWNDLLSLETGSLKLANGRVIEKTLYNRRTRQDEPALFVALTFERREVLDSSNIKPMNLIGIDRGENIPAVIALTDPEGCPLSRFKDSLGNPTHILRIGESYKEKQRTIQAKKEVEQRRAGGYSRKYASKAKNLADDMVRNTARDLLYYAVTQDAMLIFENLSRGFGRQGKRTFMAERQYTRMEDWLTAKLAYEGLSKTYLSKTLAQYTSKTCSNCGFTITSADYDRVLEKLKKTATGWMTTINGKELKVEGQITYYNRYKRQNVVKDLSVELDRLSEESVNNDISSWTKGRSGEALSLLKKRFSHRPVQEKFVCLNCGFETHADEQAALNIARSWLFLRSQEYKKYQTNKTTGNTDKRAFVETWQSFYRKKLKEVWKPAV

SEQ ID NO: 621 - protein, 976 aa, Artificial Sequence
  CasX Variant
QEIKRINKIRRRLVKDSNTKKAGKTGPMKTLLVRVMTPDLRERLENLRKKPENIPQPISNTSRANLNKLLTDYTEMKKAILHVYWEEFQKDPVGLMSRVAQPAPKNIDQRKLIPVKDGNERLTSSGFACSQCCQPLYVYKLEQVNDKGKPHTNYFGRCNVSEHERLILLSPHKPEANDELVTYSLGKFGQRALDFYSIHVTKESTHPVKPLAQIAGNRYASGPVGKALSDACMGTIASFLSKYQDIIIEHQKVVKGNQKRLESLRELAGKENLEYPSVTLPPQPHTKEGVDAYNEVIARVRMWVNLNLWQKLKLSRDDAKPLLRLKGFPSFPLVERQANEVDWWDMVCNVKKLINEKKEDGKVFWQNLAGYKRQEALRPYLSSEEDRKKGKKFARYQFGDLLLHLEKKHGEDWGKVYDEAWERIDKKVEGLSKHIKLEEERRSEDAQSKAALTDWLRAKASFVIEGLKEADKDEFCRCELKLQKWYGDLRGKPFAIEAENSILDISGFSKQYNCAFIWQKDGVKKLNLYLIINYFKGGKLRFKKIKPEAFEANRFYTVINKKSGEIVPMEVNFNFDDPNLIILPLAFGKRQGREFIWNDLLSLETGSLKLANGRVIEKTLYNRRTRQDEPALFVALTFERREVLDSSNIKPMNLIGIDRGENIPAVIALTDPEGCPLSRFKDSLGNPTHILRIGESYKEKQRTIQAKKEVEQRRAGGYSRKYASKAKNLADDMVRNTARDLLYYAVTQDAMLIFENLSRGFGRQGKRTFMAERQYTRMEDWLTAKLAYEGLSKTYLSKTLAQYTSKTCSNCGFTITSADYDRVLEKLKKTATGWMTTINGKELKVEGQITYYNRYKRQNVVKDLSVELDRLSEESVNNDISSWTKGRSGEALSLLKKRFSHRPVQEKFVCLNCGFETHADEQAALNIARSWLFLRSQEYKKYQTNKTTGNTDKRAFVETWQSFYRKKLKEVWKPAV

SEQ ID NO: 622 - protein, 976 aa, Artificial Sequence
  CasX Variant
QEIKRINKIRRRLVKDSNTKKAGKTGPMKTLLVRVMTPDLRERLENLRKKPENIPQPISNTSRANLNKLLTDYTEMKKAILHVYWEEFQKDPVGLMSRVAQPAPKNIDQRKLIPVKDGNERLTSSGFACSQCCQPLYVYKLEQVNDKGKPHTNYFGRCNVSEHERLILLSPHKPEANDELVTYSLGKFGQRALDFYSIHVTKESTHPVKPLAQIAGNRYASGPVGKALSDACMGTIASFLSKYQDIIIEHQKVVKGNQKRLESLRELAGKENLEYPSVTLPPQPHTKEGVDAYNEVIARVRMWVNLNLWQKLKLSRDDAKPLLRLKGFPSFPLVERQANEVDWWDMVCNVKKLINEKKEDGKVFWQNLAGYKRQEALRPYLSSEEDRKKGKKFARYQLGDLLLHLEKKHGEDWGKVYDEAWERIDKKVEGLSKHIKLEEERRSEDAQSKAALTDWLRAKASFVIEGLKEADKDEFCRCELKLQKWYGDLRGKPFAIEAENSILDISGFSKQYNCAFIWQKDGVKKLNLYLIINYFKGGKLRFKKIKPEAFEANRFYTVINKKSGEIVPMEVNFNFDDPNLIILPLAFGKRQGREFIWNDLLSLETGSLKLANGRVIEKTLYNRRTRQDEPALFVALTFERREVLDSSNIKPMNLIGVDRGENIPAVIALTDPEGCPLSRFKDSLGNPTHILRIGESYKEKQRTIQAKKEVEQRRAGGYSRKYASKAKNLADDMVRNTARDLLYYAVTQDAMLIFENLSRGFGRQGKRTFMAERQYTRMEDWLTAKLAYEGLSKTYLSKTLAQYTSKTCSNCGFTITSADYDRVLEKLKKTATGWMTTINGKELKVEGQITYYNRRKRQNVVKDLSVELDRLSEESVNNDISSWTKGRSGEALSLLKKRFSHRPVQEKFVCLNCGFETHADEQAALNIARSWLFLRSQEYKKYQTNKTTGNTDKRAFVETWQSFYRKKLKEVWKPAV

SEQ ID NO: 623 - protein, 976 aa, Artificial Sequence
  CasX Variant
QEIKRINKIRRRLVKDSNTKKAGKTGPMKTLLVRVMTPDLRERLENLRKKPENIPQPISNTSRANLNKLLTDYTEMKKAILHVYWEEFQKDPVGLMSRVAQPAPKNIDQRKLIPVKDGNERLTSSGFACSQCCQPLYVYKLEQVNDKGKPHTNYFGRCNVSEHERLILLSPHKPEANDELVTYSLGKFGQRALDFYSIHVTKESTHPVKPLAQIAGNRYASGPVGKALSDACMGTIASFLSKYQDIIIEHQKVVKGNQKRLESLRELAGKENLEYPSVTLPPQPHTKEGVDAYNEVIARVRMWVNLNLWQKLKLSRDDAKPLLRLKGFPSFPLVERQANEVDWWDMVCNVKKLINEKKEDGKVFWQNLAGYKRQEALRPYLSSEEDRKKGKKFARYQLGDLLKHLEKKHGEDWGKVYDEAWERIDKKVEGLSKHIKLEEERRSEDAQSKAALTDWLRAKASFVIEGLKEADKDEFCRCELKLQKWYGDLRGKPFAIEAENSILDISGFSKQYNCAFIWQKDGVKKLNLYLIINYFKGGKLRFKKIKPEAFEANRFYTVINKKSGEIVPMEVNFNFDDPNLIILPLAFGKRQGREFIWNDLLSLETGSLKLANGRVIEKTLYNRRTRQDEPALFVALTFERREVLDSSNIKPMNLIGVDRGENIPAVIALTDPEGCPLSRFKDSLGNPTHILRIGESYKEKQRTIQAKKEVEQRRAGGYSRKYASKAKNLADDMVRNTARDLLYYAVTQDAMLIFENLSRGFGRQGKRTFMAERQYTRMEDWLTAKLAYEGLSKTYLSKTLAQYTSKTCSNCGFTITSADYDRVLEKLKKTATGWMTTINGKELKVEGQITYYNRRKRQNVVKDLSVELDRLSEESVNNDISSWTKGRSGEALSLLKKRFSHRPVQEKFVCLNCGFETHADEQAALNIARSWLFLRSQEYKKYQTNKTTGNTDKRAFVETWQSFYRKKLKEVWKPAV

SEQ ID NO: 624 - protein, 976 aa, Artificial Sequence
  CasX Variant
QEIKRINKIRRRLVKDSNTKKAGKTGPMKTLLVRVMTPDLRERLENLRKKPENIPQPISNTSRANLNKLLTDYTEMKKAILHVYWEEFQKDPVGLMSRVAQPAPKNIDQRKLIPVKDGNERLTSSGFACSQCCQPLYVYKLEQVNDKGKPHTNYFGRCNVSEHERLILLSPHKPEANDELVTYSLGKFGQRALDFYSIHVTKESTHPVKPLAQIAGNRYASGPVGKALSDACMGTIASFLSKYQDIIIEHQKVVKGNQKRLESLRELAGKENLEYPSVTLPPQPHTKEGVDAYNEVIARVRMWVNLNLWQKLKLSRDDAKPLLRLKGFPSFPLVERQANEVDWWDMVCNVKKLINEKKEDGKVFWQNLAGYKRQEALRPYLSSEEDRKKGKKFARYQLGDLLLHLEKKHGEDWGKVYDEAWERIDKKVEGLSKHIKLEEERRSEDAQSKAALTDWLRAKASFVIEGLKEADKDEFCRCELKLQKWYGDLRGKPFAIEAENSILDISGFSKQYNCAFIWQKDGVKKLNLYLIINYFKGGKLRFKKIKPEAFEANRFYTVINKKSGEIVPMEVNFNFDDPNLIILPLAFGKRQGREFIWNDLLSLETGSLKLANGRVIEKTLYNRRTRQDEPALFVALTFERREVLDSSNIKPMNLIGVDRGENIPAVIALTDPEGCPLSRFKDSLGNPTHILRIGESYKEKQRTIQAKKEVEQRRAGGYSRKYASKAKNLADDMVRNTARDLLYYAVTQDAMLIFENLSRGFGRQGKRTFMAERQYTRMEDWLTAKLAYEGLSKTYLSKTLAQYTSKTCSNCGFTITSADYDRVLEKLKKTATGWMTTINGKELKVEGQITYYNRYKRQNVVKDLSVELDRLSEESVNNDISSWTKGRSGEALSLLKKRFSHRPVQEKFVCLNCGFETHADEQAALNIARSWLFLRSQEYKKYQTNKTTGNTDKRAFVETWQSFYRKKLKEVWKPAV

SEQ ID NO: 625 - protein, 977 aa, Artificial Sequence
  CasX Variant
QEIKRINKIRRRLVKDSNTKKAGKTGPMKTLLVRVMTPDLRERLENLRKKPENIPQPISNTSRANLNKLLTDYTEMKKAILHVYWEEFQKDPVGLMSRVAQPASKKIDQNKLKPEMDEKGNLTTAGFACSQCGQPLFVYKLEQVSEKGKAYTNYFGRCNVAEHEKLILLAQLKPEKDSDEAVTYSLGKFGQRALDFYSIHVTKESTHPVKPLAQIAGNRYASGPVGKALSDACMGTIASFLSKYQDIIIEHQKVVKGNQKRLESLRELAGKENLEYPSVTLPPQPHTKEGVDAYNEVIARVRMWVNLNLWQKLKLSRDDAKPLLRLKGFPSFPLVERQANEVDWWDMVCNVKKLINEKKEDGKVFWQNLAGYKRQEALRPYLSSEEDRKKGKKFARYQFGDLLLHLEKKHGEDWGKVYDEAWERIDKKVEGLSKHIKLEEERRSEDAQSKAALTDWLRAKASFVIEGLKEADKDEFCRCELKLQKWYGDLRGKPFAIEAENSILDISGFSKQYNCAFIWQKDGVKKLNLYLIINYFKGGKLRFKKIKPEAFEANRFYTVINKKSGEIVPMEVNFNFDDPNLIILPLAFGKRQGREFIWNDLLSLETGSLKLANGRVIEKTLYNRRTRQDEPALFVALTFERREVLDSSNIKPMNLIGIDRGENIPAVIALTDPEGCPLSRFKDSLGNPTHILRIGESYKEKQRTIQAKKEVEQRRAGGYSRKYASKAKNLADDMVRNTARDLLYYAVTQDAMLIFENLSRGFGRQGKRTFMAERQYTRMEDWLTAKLAYEGLSKTYLSKTLAQYTSKTCSNCGFTITSADYDRVLEKLKKTATGWMTTINGKELKVEGQITYYNRYKRQNVVKDLSVELDRLSEESVNNDISSWTKGRSGEALSLLKKRFSHRPVQEKFVCLNCGFETHADEQAALNIARSWLFLRSQEYKKYQTNKTTGNTDKRAFVETWQSFYRKKLKEVWKPAV

SEQ ID NO: 626 - protein, 977 aa, Artificial Sequence
  CasX Variant
QEIKRINKIRRRLVKDSNTKKAGKTGPMKTLLVRVMTPDLRERLENLRKKPENIPQPISNTSRANLNKLLTDYTEMKKAILHVYWEEFQKDPVGLMSRVAQPASKKIDQNKLKPEMDEKGNLTTAGFACSQCGQPLFVYKLEQVSEKGKAYTNYFGRCNVAEHEKLILLAQLKPEKDSDEAVTYSLGKFGQRALDFYSIHVTKESTHPVKPLAQIAGNRYASGPVGKALSDACMGTIASFLSKYQDIIIEHQKVVKGNQKRLESLRELAGKENLEYPSVTLPPQPHTKEGVDAYNEVIARVRMWVNLNLWQKLKLSRDDAKPLLRLKGFPSFPLVERQANEVDWWDMVCNVKKLINEKKEDGKVFWQNLAGYKRQEALRPYLSSEEDRKKGKKFARYQLGDLLLHLEKKHGEDWGKVYDEAWERIDKKVEGLSKHIKLEEERRSEDAQSKAALTDWLRAKASFVIEGLKEADKDEFCRCELKLQKWYGDLRGKPFAIEAENSILDISGFSKQYNCAFIWQKDGVKKLNLYLIINYFKGGKLRFKKIKPEAFEANRFYTVINKKSGEIVPMEVNFNFDDPNLIILPLAFGKRQGREFIWNDLLSLETGSLKLANGRVIEKTLYNRRTRQDEPALFVALTFERREVLDSSNIKPMNLIGVDRGENIPAVIALTDPEGCPLSRFKDSLGNPTHILRIGESYKEKQRTIQAKKEVEQRRAGGYSRKYASKAKNLADDMVRNTARDLLYYAVTQDAMLIFENLSRGFGRQGKRTFMAERQYTRMEDWLTAKLAYEGLSKTYLSKTLAQYTSKTCSNCGFTITSADYDRVLEKLKKTATGWMTTINGKELKVEGQITYYNRRKRQNVVKDLSVELDRLSEESVNNDISSWTKGRSGEALSLLKKRFSHRPVQEKFVCLNCGFETHADEQAALNIARSWLFLRSQEYKKYQTNKTTGNTDKRAFVETWQSFYRKKLKEVWKPAV

SEQ ID NO: 627 - protein, 977 aa, Artificial Sequence
  CasX Variant
QEIKRINKIRRRLVKDSNTKKAGKTGPMKTLLVRVMTPDLRERLENLRKKPENIPQPISNTSRANLNKLLTDYTEMKKAILHVYWEEFQKDPVGLMSRVAQPASKKIDQNKLKPEMDEKGNLTTAGFACSQCGQPLFVYKLEQVSEKGKAYTNYFGRCNVAEHEKLILLAQLKPEKDSDEAVTYSLGKFGQRALDFYSIHVTKESTHPVKPLAQIAGNRYASGPVGKALSDACMGTIASFLSKYQDIIIEHQKVVKGNQKRLESLRELAGKENLEYPSVTLPPQPHTKEGVDAYNEVIARVRMWVNLNLWQKLKLSRDDAKPLLRLKGFPSFPLVERQANEVDWWDMVCNVKKLINEKKEDGKVFWQNLAGYKRQEALRPYLSSEEDRKKGKKFARYQLGDLLKHLEKKHGEDWGKVYDEAWERIDKKVEGLSKHIKLEEERRSEDAQSKAALTDWLRAKASFVIEGLKEADKDEFCRCELKLQKWYGDLRGKPFAIEAENSILDISGFSKQYNCAFIWQKDGVKKLNLYLIINYFKGGKLRFKKIKPEAFEANRFYTVINKKSGEIVPMEVNFNFDDPNLIILPLAFGKRQGREFIWNDLLSLETGSLKLANGRVIEKTLYNRRTRQDEPALFVALTFERREVLDSSNIKPMNLIGVDRGENIPAVIALTDPEGCPLSRFKDSLGNPTHILRIGESYKEKQRTIQAKKEVEQRRAGGYSRKYASKAKNLADDMVRNTARDLLYYAVTQDAMLIFENLSRGFGRQGKRTFMAERQYTRMEDWLTAKLAYEGLSKTYLSKTLAQYTSKTCSNCGFTITSADYDRVLEKLKKTATGWMTTINGKELKVEGQITYYNRRKRQNVVKDLSVELDRLSEESVNNDISSWTKGRSGEALSLLKKRFSHRPVQEKFVCLNCGFETHADEQAALNIARSWLFLRSQEYKKYQTNKTTGNTDKRAFVETWQSFYRKKLKEVWKPAV

SEQ ID NO: 628 - protein, 977 aa, Artificial Sequence
  CasX Variant
QEIKRINKIRRRLVKDSNTKKAGKTGPMKTLLVRVMTPDLRERLENLRKKPENIPQPISNTSRANLNKLLTDYTEMKKAILHVYWEEFQKDPVGLMSRVAQPASKKIDQNKLKPEMDEKGNLTTAGFACSQCGQPLFVYKLEQVSEKGKAYTNYFGRCNVAEHEKLILLAQLKPEKDSDEAVTYSLGKFGQRALDFYSIHVTKESTHPVKPLAQIAGNRYASGPVGKALSDACMGTIASFLSKYQDIIIEHQKVVKGNQKRLESLRELAGKENLEYPSVTLPPQPHTKEGVDAYNEVIARVRMWVNLNLWQKLKLSRDDAKPLLRLKGFPSFPLVERQANEVDWWDMVCNVKKLINEKKEDGKVFWQNLAGYKRQEALRPYLSSEEDRKKGKKFARYQLGDLLLHLEKKHGEDWGKVYDEAWERIDKKVEGLSKHIKLEEERRSEDAQSKAALTDWLRAKASFVIEGLKEADKDEFCRCELKLQKWYGDLRGKPFAIEAENSILDISGFSKQYNCAFIWQKDGVKKLNLYLIINYFKGGKLRFKKIKPEAFEANRFYTVINKKSGEIVPMEVNFNFDDPNLIILPLAFGKRQGREFIWNDLLSLETGSLKLANGRVIEKTLYNRRTRQDEPALFVALTFERREVLDSSNIKPMNLIGVDRGENIPAVIALTDPEGCPLSRFKDSLGNPTHILRIGESYKEKQRTIQAKKEVEQRRAGGYSRKYASKAKNLADDMVRNTARDLLYYAVTQDAMLIFENLSRGFGRQGKRTFMAERQYTRMEDWLTAKLAYEGLSKTYLSKTLAQYTSKTCSNCGFTITSADYDRVLEKLKKTATGWMTTINGKELKVEGQITYYNRYKRQNVVKDLSVELDRLSEESVNNDISSWTKGRSGEALSLLKKRFSHRPVQEKFVCLNCGFETHADEQAALNIARSWLFLRSQEYKKYQTNKTTGNTDKRAFVETWQSFYRKKLKEVWKPAV

SEQ ID NO: 629 - protein, 977 aa, Artificial Sequence
  CasX Variant
QEIKRINKIRRRLVKDSNTKKAGKTGPMKTLLVRVMTPDLRERLENLRKKPENIPQPISNTSRANLNKLLTDYTEMKKAILHVYWEEFQKDPVGLMSRVAQPASKKIDQNKLKPEMDEKGNLTTAGFACSQCGQPLFVYKLEQVSEKGKAYTNYFGRCNVAEHEKLILLAQLKPEKDSDEAVTYSLGKFGQRALDFYSIHVTRESNHPVKPLEQIGGNSCASGPVGKALSDACMGAVASFLTKYQDIILEHQKVIKKNEKRLANLKDIASANGLAFPKITLPPQPHTKEGIEAYNNVVAQIVIWVNLNLWQKLKIGRDEAKPLQRLKGFPSFPLVERQANEVDWWDMVCNVKKLINEKKEDGKVFWQNLAGYKRQEALRPYLSSEEDRKKGKKFARYQLGDLLLHLEKKHGEDWGKVYDEAWERIDKKVEGLSKHIKLEEERRSEDAQSKAALTDWLRAKASFVIEGLKEADKDEFCRCELKLQKWYGDLRGKPFAIEAENSILDISGFSKQYNCAFIWQKDGVKKLNLYLIINYFKGGKLRFKKIKPEAFEANRFYTVINKKSGEIVPMEVNFNFDDPNLIILPLAFGKRQGREFIWNDLLSLETGSLKLANGRVIEKTLYNRRTRQDEPALFVALTFERREVLDSSNIKPMNLIGVDRGENIPAVIALTDPEGCPLSRFKDSLGNPTHILRIGESYKEKQRTIQAKKEVEQRRAGGYSRKYASKAKNLADDMVRNTARDLLYYAVTQDAMLIFENLSRGFGRQGKRTFMAERQYTRMEDWLTAKLAYEGLSKTYLSKTLAQYTSKTCSNCGFTITSADYDRVLEKLKKTATGWMTTINGKELKVEGQITYYNRYKRQNVVKDLSVELDRLSEESVNNDISSWTKGRSGEALSLLKKRFSHRPVQEKFVCLNCGFETHADEQAALNIARSWLFLRSQEYKKYQTNKTTGNTDKRAFVETWQSFYRKKLKEVWKPAV

SEQ ID NO: 630 - protein, 978 aa, Artificial Sequence
  CasX Variant
MQEIKRINKIRRRLVKDSNTKKAGKTGPMKTLLVRVMTPDLRERLENLRKKPENIPQPISNTSRANLNKLLTDYTEMKKAILHVYWEEFQKDPVGLMSRVAQPAPKNIDQRKLIPVKDGNERLTSSGFACSQCCQPLYVYKLEQVNDKGKPHTNYFGRCNVSEHERLILLSPHKPEANDELVTYSLGKFGQRALDFYSIHVTRESNHPVKPLEQIGGNSCASGPVGKALSDACMGAVASFLTKYQDIILEHQKVIKKNEKRLANLKDIASANGLAFPKITLPPQPHTKEGIEAYNNVVAQIVIWVNLNLWQKLKIGRDEAKPLQRLKGFPSFPLVERQANEVDWWDMVCNVKKLINEKKEDGKVFWQNLAGYKRQEALLPYLSSEEDRKKGKKFARYQFGDLLLHLEKKHGEDWGKVYDEAWERIDKKVEGLSKHIKLEEERRSEDAQSKAALTDWLRAKASFVIEGLKEADKDEFCRCELKLQKWYGDLRGKPFAIEAENSILDISGFSKQYNCAFIWQKDGVKKLNLYLIINYFKGGKLRFKKIKPEAFEANRFYTVINKKSGEIVPMEVNFNFDDPNLIILPLAFGKRQGREFIWNDLLSLETGSLKLANGRVIEKTLYNRRTRQDEPALFVALTFERREVLDSSNIKPMNLIGIDRGENIPAVIALTDPEGCPLSRFKDSLGNPTHILRIGESYKEKQRTIQAAKEVEQRRAGGYSRKYASKAKNLADDMVRNTARDLLYYAVTQDAMLIFENLSRGFGRQGKRTFMAERQYTRMEDWLTAKLAYEGLPSKTYLSKTLAQYTSKTCSNCGFTITSADYDRVLEKLKKTATGWMTTINGKELKVEGQITYYNRYKRQNVVKDLGVELDRLSEESVNNDISSWTKGRSGEALSLLKKRFSHRPVQEKFVCLNCGFETHADEQAALNIARSWLFLRSQEYKKYQTNKTTGNTDKRAFVETWQSFYRKKLKEVWKPAV

SEQ ID NO: 631 - protein, 986 aa, Artificial Sequence
  CasX Variant
MQEIKRINKIRRRLVKDSNTKKAGKTGPMKTLLVRVMTPDLRERLENLRKKPENIPQPISNTSRANLNKLLTDYTEMKKAILHVYWEEFQKDPVGLMSRVAQPAPKNIDQRKLIPVKDGNERLTSSGFACSQCCQPLYVYKLEQVNDKGKPHTNYFGRCNVSEHERLILLSPHKPEANDELVTYSLGKFGQRALDFYSIHVTRESNHPVKPLEQIGGNSCASGPVGKALSDACMGAVASFLTKYQDIILEHQKVIKKNEKRLANLKDIASANGLAFPKITLPPQPHTKEGIEAYNNVVAQIVIWVNLNLWQKLKIGRDEAKPLQRLKGFPSFPVVERRENEVDWWNTINEVKKLIDAKRDMGRVFWSGVTAEKRNTILEGYNYLPNENDHKKREGSLENPKKPAKRQFGDLLLYLEKKYAGDWGKVFDEAWERIDKKIAGLTSHIEREEARNAEDAQSKAVLTDWLRAKASFVLERLKEMDEKEFYACEIQLQKWYGDLRGNPFAVEAENSILDISGFSKQYNCAFIWQKDGVKKLNLYLIINYFKGGKLRFKKIKPEAFEANRFYTVINKKSGEIVPMEVNFNFDDPNLIILPLAFGKRQGREFIWNDLLSLETGSLKLANGRVIEKTLYNRRTRQDEPALFVALTFERREVLDSSNIKPMNLIGIDRGENIPAVIALTDPEGCPLSRFKDSLGNPTHILRIGESYKEKQRTIQAKKEVEQRRAGGYSRKYASKAKNLADDMVRNTARDLLYYAVTQDAMLIFENLSRGFGRQGKRTFMAERQYTRMEDWLTAKLAYEGLSKTYLSKTLAQYTSKTCSNCGFTITSADYDRVLEKLKKTATGWMTTINGKELKVEGQITYYNRYKRQNVVKDLSVELDRLSEESVNNDISSWTKGRSGEALSLLKKRFSHRPVQEKFVCLNCGFETHADEQAALNIARSWLFLRSQEYKKYQTNKTTGNTDKRAFVETWQSFYRKKLKEVWKPAV

SEQ ID NO: 632 - protein, 978 aa, Artificial Sequence
  CasX Variant
MQEIKRINKIRRRLVKDSNTKKAGKTGPMKTLLVRVMTPDLRERLENLRKKPENIPQPISNTSRANLNKLLTDYTEMKKAILHVYWEEFQKDPVGLMSRVAQPAPKNIDQRKLIPVKDGNERLTSSGFACSQCCQPLYVYKLEQVNDKGKPHTNYFGRCNVSEHERLILLSPHKPEANDELVTYSLGKFGQRALDFYSIHVTRESNHPVKPLEQIGGNSCASGPVGKALSDACMGAVASFLTKYQDIILEHQKVIKKNEKRLANLKDIASANGLAFPKITLPPQPHTKEGIEAYNNVVAQIVIWVNLNLWQKLKIGRDEAKPLQRLKGFPSFPLVERQANEVDWWDMVCNVKKLINEKKEDGKVFWQNLAGYKRQEALRPYLSSEEDRKKGKKFARYQFGDLLLHLEKKHGEDWGKVYDEAWERIDKKVEGLSKHIKLEEERRSEDAQSKAALTDWLRAKASFVIEGLKEADKDEFCRCELKLQKWYGDLRGKPFAIEAENSILDISGFSKQYNCAFIWQKDGVKKLNLYLIINYFKGGKLRFKKIKPEAFEANRFYTVINKKSGEIVPMEVNFNFDDPNLIILPLAFGKRQGREFIWNDLLSLETGSLKLANGRVIEKTLYNRRTRQDEPALFVALTFERREVLDSSNIKPVNLIGVDRGENIPAVIALTDPEGCPLPEFKDSSGGPTDILRIGEGYKEKQRAIQAAKEVEQRRAGGYSRKFASKSRNLADDMVRNSARDLFYHAVTHDAVLVFENLSRGFGRQGKRTFMTERQYTKMEDWLTAKLAYEGLTSKTYLSKTLAQYTSKTCSNCGFTITSADYDRVLEKLKKTATGWMTTINGKELKVEGQITYYNRYKRQNVVKDLSVELDRLSEESVNNDISSWTKGRSGEALSLLKKRFSHRPVQEKFVCLNCGFETHADEQAALNIARSWLFLRSQEYKKYQTNKTTGNTDKRAFVETWQSFYRKKLKEVWKPAV

SEQ ID NO: 633 - protein, 972 aa, Artificial Sequence
  CasX Variant
MQEIKRINKIRRRLVKDSNTKKAGKTGPMKTLLVRVMTPDLRERLENLRKKPENIPQPISNTSRANLNKLLTDYTEMKKAILHVYWEEFQKDPVGLMSRVAQPAPKNIDQRKLIPVKDGNERLTSSGFACSQCCQPLYVYKLEQVNDKGKPHTNYFGRCNVSEHERLILLSPHKPEANDELVTYSLGKFGQRALDFYSIHVTRESNHPVKPLEQIGGNSCASGPVGKALSDACMGAVASFLTKYQDIILEHQKVIKKNEKRLANLKDIASANGLAFPKITLPPQPHTKEGIEAYNNVVAQIVIWVNLNLWQKLKIGRDEAKPLQRLKGFPSFPLVERQANEVDWWDMVCNVKKLINEKKEDGKVFWQNLAGYKRQEALRPYLSSEEDRKKGKKFARYQFGDLLLHLEKKHGEDWGKVYDEAWERIDKKVEGLSKHIKLEEERRSEDAQSKAALTDWLRAKASFVIEGLKEADKDEFCRCELKLQKWYGDLRGKPFAIEAENSILDISGFSKQYNCAFIWQKDGVKKLNLYLIINYFKGGKLRFKKIKPEAFEANRFYTVINKKSGEIVPMEVNFNFDDPNLIILPLAFGKRQGREFIWNDLLSLETGSLKLANGRVIEKTLYNRRTRQDEPALFVALTFERREVLDSSNIKPMNLIGIDRGENIPAVIALTDPEGCPLSRFKDSLGNPTHILRIGESYKEKQRTIQAKKEVEQRRAGGYSRKYASKAKNLADDMVRNTARDLLYYAVTQDAMLIFENLSRGFGRQGKRTFMAERQYTRMEDWLTAKLAYEGLSKTYLSKTLAQYTSKTCSNCGFTITSADYDRVLEKLKKTATGWMTTINGKELKVEGQITYYNRYKRQNVVKDLSVELDRLSEESVNNDISSWTKGRSGEALSLLKKRFSHRPVQEKFVCLNCGFETHADEQAALNIARSWLFLNSNSTEFKSYKSGKQPFVGAWQAFYKRRLKEVWKPNA

SEQ ID NO: 634 - protein, 978 aa, Artificial Sequence
  CasX Variant
QEIKRINKIRRRLVKDSNTKKAGKTGPMKTLLVRVMTPDLRERLENLRKKPENIPQPISNTSRANLNKLLTDYTEMKKAILHVYWEEFQKDPVGLMSRVAQPASKKIDQNKLKPEMDEKGNLTTAGFACSQCGQPLFVYKLEQVSEKGKAYTNYFGRCNVAEHEKLILLAQLKPEKDSDEAVTYSLGKFGQRALDFYSIHVTKESTHPVKPLAQIAGNRYASGPVGKALSDACMGTIASFLSKYQDIIIEHQKVVKGNQKRLESLRELAGKENLEYPSVTLPPQPHTKEGVDAYNEVIARVRMWVNLNLWQKLKLSRDDAKPLLRLKGFPSFPLVERQANEVDWWDMVCNVKKLINEKKEDGKVFWQNLAGYKRQEALRPYLSSEEDRKKGKKFARYQLGDLLLHLEKKHGEDWGKVYDEAWERIDKKVEGLSKHIKLEEERRSEDAQSKAALTDWLRAKASFVIEGLKEADKDEFCRCELKLQKWYGDLRGKPFAIEAENSILDISGFSKQYNCAFIWQKDGVKKLNLYLIINYFKGGKLRFKKIKPEAFEANRFYTVINKKSGEIVPMEVNFNFDDPNLIILPLAFGKRQGREFIWNDLLSLETGSLKLANGRVIEKTLYNRRTRQDEPALFVALTFERREVLDSSNIKPMNLIGVDRGENIPAVIALTDPEGCPLSRFKDSLGNPTHILRIGESYKEKQRTIQAKKEVEQRRAGGYSRKYASKAKNLADDMVRNTARDLLYYAVTQDAMLIFENLSRGFGRQGKRTFMAERQYTRMEDWLTAKLAYEGLSKTYLSKTLAQYTSKTCSNCGFTIHTSADYDRVLEKLKKTATGWMTTINGKELKVEGQITYYNRYKRQNVVKDLSVELDRLSEESVNNDISSWTKGRSGEALSLLKKRFSHRPVQEKFVCLNCGFETHADEQAALNIARSWLFLRSQEYKKYQTNKTTGNTDKRAFVETWQSFYRKKLKEVWKPAV

SEQ ID NO: 635 - protein, 978 aa, Artificial Sequence
  CasX Variant
QEIKRINKIRRRLVKDSNTKKAGKTGPMKTLLVRVMTPDLRERLENLRKKPENIPQPISNTSRANLNKLLTDYTEMKKAILHVYWEEFQKDPVGLMSRVAQPASKKIDQNKLKPEMDEKGNLTTAGFACSQCGQPLFVYKLEQVSEKGKAYTNYFGRCNVAEHEKLILLAQLKPEKDSDEAVTYSLGKFGQRALDFYSIHVTKESTHPVKPLAQIAGNRYASGPVGKALSDACMGTIASFLSKYQDIIIEHQKVVKGNQKRLESLRELAGKENLEYPSVTLPPQPHTKEGVDAYNEVIARVRMWVNLNLWQKLKLSRDDAKPLLRLKGFPSFPLVERQANEVDWWDMVCNVKKLINEKKEDGKVFWQNLAGYKRQEALRPYLSSEEDRKKGKKFARYQLGDLLLHLEKKHGEDWGKVYDEAWERIDKKVEGLSKHIKLEEERRSEDAQSKAALTDWLRAKASFVIEGLKEADKDEFCRCELKLQKWYGDLRGKPFAIEAENSILDISGFSKQYNCAFIWQKDGVKKLNLYLIINYFKGGKLRFKKIKPEAFEANRFYTVINKKSGEIVPMEVNFNFDDPNLIILPLAFGKRQGREFIWNDLLSLETGSLKLANGRVIEKTLYNRRTRQDEPALFVALTFERREVLDSSNIKPMNLIGVDRGENIPAVIALTDPEGCPLSRFKDSLGNPTHILRIGESYKEKQRTIQAKKEVEQRRAGGYSRKYASKAKNLADDMVRNTARDLLYYAVTQDAMLIFENLSRGFGRQGKRTFMAERQYTRMEDWLTAKLAYEGLPSKTYLSKTLAQYTSKTCSNCGFTITSADYDRVLEKLKKTATGWMTTINGKELKVEGQITYYNRYKRQNVVKDLSVELDRLSEESVNNDISSWTKGRSGEALSLLKKRFSHRPVQEKFVCLNCGFETHADEQAALNIARSWLFLRSQEYKKYQTNKTTGNTDKRAFVETWQSFYRKKLKEVWKPAV

SEQ ID NO: 636 - protein, 977 aa, Artificial Sequence
  CasX Variant
QEIKRINKIRRRLVKDSNTKKAGKTGPMKTLLVRVMTPDLRERLENLRKKPENIPQPISNTSRANLNKLLTDYTEMKKAILHVYWEEFQKDPVGLMSRVAQPASKKIDQNKLKPEMDEKGNLTTAGFACSQCGQPLFVYKLEQVSEKGKAYTNYFGRCNVAEHEKLILLAQLKPEKDSDEAVTYSLGKFGQRALDFYSIHVTKESTHPVKPLAQIAGNRYASGPVGKALSDACMGTIASFLSKYQDIIIEHQKVVKGNQKRLESLRELAGKENLEYPSVTLPPQPHTKEGVDAYNEVIARVRMWVNHNLWQKLKLSRDDAKPLLRLKGFPSFPLVERQANEVDWWDMVCNVKKLINEKKEDGKVFWQNLAGYKRQEALRPYLSSEEDRKKGKKFARYQLGDLLLHLEKKHGEDWGKVYDEAWERIDKKVEGLSKHIKLEEERRSEDAQSKAALTDWLRAKASFVIEGLKEADKDEFCRCELKLQKWYGDLRGKPFAIEAENSILDISGFSKQYNCAFIWQKDGVKKLNLYLIINYFKGGKLRFKKIKPEAFEANRFYTVINKKSGEIVPMEVNFNFDDPNLIILPLAFGKRQGREFIWNDLLSLETGSLKLANGRVIEKTLYNRRTRQDEPALFVALTFERREVLDSSNIKPMNLIGVDRGENIPAVIALTDPEGCPLSRFKDSLGNPTHILRIGESYKEKQRTIQAKKEVEQRRAGGYSRKYASKAKNLADDMVRNTARDLLYYAVTQDAMLIFENLSRGFGRQGKRTFMAERQYTRMEDWLTAKLAYEGLSKTYLSKTLAQYTSKTCSNCGFTITSADYDRVLEKLKKTATGWMTTINGKELKVEGQITYYNRYKRQNVVKDLSVELDRLSEESVNNDISSWTKGRSGEALSLLKKRFSHRPVQEKFVCLNCGFETHADEQAALNIARSWLFLRSQEYKKYQTNKTTGNTDKRAFVETWQSFYRKKLKEVWKPAV

SEQ ID NO: 637 - protein, 978 aa, Artificial Sequence
  CasX Variant
QEIKRINKIRRRLVKDSNTKKAGKTGPMKTLLVRVMTPDLRERLENLRKKPENIPQPISNTSRANLNKLLTDYTEMKKAILHVYWEEFQKDPVGLMSRVAQPASKKIDQNKLKPEMDEKGNLTTAGFACSQCGQPLFVYKLEQVSEKGKAYTNYFGRCNVAEHEKLILLAQLKPEKDSDEAVTYSLGKFGQRALDFYSIHVTKESTHPVKPLAQIAGNRYASGAPVGKALSDACMGTIASFLSKYQDIIIEHQKVVKGNQKRLESLRELAGKENLEYPSVTLPPQPHTKEGVDAYNEVIARVRMWVNLNLWQKLKLSRDDAKPLLRLKGFPSFPLVERQANEVDWWDMVCNVKKLINEKKEDGKVFWQNLAGYKRQEALRPYLSSEEDRKKGKKFARYQLGDLLLHLEKKHGEDWGKVYDEAWERIDKKVEGLSKHIKLEEERRSEDAQSKAALTDWLRAKASFVIEGLKEADKDEFCRCELKLQKWYGDLRGKPFAIEAENSILDISGFSKQYNCAFIWQKDGVKKLNLYLIINYFKGGKLRFKKIKPEAFEANRFYTVINKKSGEIVPMEVNFNFDDPNLIILPLAFGKRQGREFIWNDLLSLETGSLKLANGRVIEKTLYNRRTRQDEPALFVALTFERREVLDSSNIKPMNLIGVDRGENIPAVIALTDPEGCPLSRFKDSLGNPTHILRIGESYKEKQRTIQAKKEVEQRRAGGYSRKYASKAKNLADDMVRNTARDLLYYAVTQDAMLIFENLSRGFGRQGKRTFMAERQYTRMEDWLTAKLAYEGLSKTYLSKTLAQYTSKTCSNCGFTITSADYDRVLEKLKKTATGWMTTINGKELKVEGQITYYNRYKRQNVVKDLSVELDRLSEESVNNDISSWTKGRSGEALSLLKKRFSHRPVQEKFVCLNCGFETHADEQAALNIARSWLFLRSQEYKKYQTNKTTGNTDKRAFVETWQSFYRKKLKEVWKPAV

SEQ ID NO: 638 - protein, 979 aa, Artificial Sequence
  CasX Variant
RQEIKRINKIRRRLVKDSNTKKAGKTGPMKTLLVRVMTPDLRERLENLRKKPENIPQPISNTSRANLNKLLTDYTEMKKAILHVYWEEFQKDPVGLMSRVAQPASKKIDQNKLKPEMDEKGNLTTAGFACSQCGQPLFVYKLEQVSEKGKAYTNYFGRCNVAEHEKLILLAQLKPEKDSDEAVTYSLGKFGQRALDFYSIHVTKESTHPVKPLAQIAGNRYASGAPVGKALSDACMGTIASFLSKYQDIIIEHQKVVKGNQKRLESLRELAGKENLEYPSVTLPPQPHTKEGVDAYNEVIARVRMWVNLNLWQKLKLSRDDAKPLLRLKGFPSFPLVERQANEVDWWDMVCNVKKLINEKKEDGKVFWQNLAGYKRQEALRPYLSSEEDRKKGKKFARYQLGDLLLHLEKKHGEDWGKVYDEAWERIDKKVEGLSKHIKLEEERRSEDAQSKAALTDWLRAKASFVIEGLKEADKDEFCRCELKLQKWYGDLRGKPFAIEAENSILDISGFSKQYNCAFIWQKDGVKKLNLYLIINYFKGGKLRFKKIKPEAFEANRFYTVINKKSGEIVPMEVNFNFDDPNLIILPLAFGKRQGREFIWNDLLSLETGSLKLANGRVIEKTLYNRRTRQDEPALFVALTFERREVLDSSNIKPMNLIGVDRGENIPAVIALTDPEGCPLSRFKDSLGNPTHILRIGESYKEKQRTIQAKKEVEQRRAGGYSRKYASKAKNLADDMVRNTARDLLYYAVTQDAMLIFENLSRGFGRQGKRTFMAERQYTRMEDWLTAKLAYEGLSKTYLSKTLAQYTSKTCSNCGFTITSADYDRVLEKLKKTATGWMTTINGKELKVEGQITYYNRYKRQNVVKDLSVELDRLSEESVNNDISSWTKGRSGEALSLLKKRFSHRPVQEKFVCLNCGFETHADEQAALNIARSWLFLRSQEYKKYQTNKTTGNTDKRAFVETWQSFYRKKLKEVWKPAV

SEQ ID NO: 639 - protein, 978 aa, Artificial Sequence
  CasX Variant
QEIKRINKIRRRLVKDSNTKKAGKTGPMKTLLVRVMTPDLRERLENLRKKPENIPQPISNTSRANLNKLLTDYTEMKKAILHVYWEEFQKDPVGLMSRVAQPASKKIDQNKLKPEMDEKGNLTTAGFACSQCGQPLFVYKLEQVSEKGKAYTNYFGRCNVAEHEKLILLAQLKPEKDSDEAVTYSLGKFGQRALDFYSIHVTKESTHPVKPLAQIAGNRYASGPVGKALSDACMGTIASFLSKYQDIIIEHQKVVKGNQKRLESLRELAGKENLEYPSVTLPPQPHTKEGVDAYNEVIARVRMWVNLNLWQKLKLSRDDAKPLLRLKGFPSFPLVERQANEVDWWDMVCNVKKLINEKKEDGKVFWQNLAGYKRQEALRPYLSSEEDRKKGKKFARYQLGDLLLHLEKKHGEDWGKVYDEAWERIDKKVEGLSKHIKLEEERRSEDAQSKAALTDWLRAKASFVIEGLKEADKDEFCRCELKLQKWYGDLRGKPFAIEAENSILDISGFSKQYNCAFIWQKDGVKKLNLYLIINYFKGGKLRFKKIKPEAFEANRFYTVINKKSGEIVPMEVNFNFDDPNLIILPLAFGKRQGREFIWNDLLSLETGSLKLANGRVIEKTLYNRRTRQDEPALFVALTFERREVLDSSNIKPMNLIGVDRGENIPAVIALTDPEGCPLSRFKDSLGNPTHIQLRIGESYKEKQRTIQAKKEVEQRRAGGYSRKYASKAKNLADDMVRNTARDLLYYAVTQDAMLIFENLSRGFGRQGKRTFMAERQYTRMEDWLTAKLAYEGLSKTYLSKTLAQYTSKTCSNCGFTITSADYDRVLEKLKKTATGWMTTINGKELKVEGQITYYNRYKRQNVVKDLSVELDRLSEESVNNDISSWTKGRSGEALSLLKKRFSHRPVQEKFVCLNCGFETHADEQAALNIARSWLFLRSQEYKKYQTNKTTGNTDKRAFVETWQSFYRKKLKEVWKPAV

SEQ ID NO: 640 - protein, 977 aa, Artificial Sequence
  CasX Variant
QEIKRINKIRRRLVKDSNTKKAGKTGPMKTLLVRVMTPDLRERLENLRKKPENIPQPISNTSRANLNKLLTDYTEMKKAILHVYWEEFQKDPVGLMSRVAQPASKKIDQNKLKPEMDEKGNLTTAGFACSQCGQPLFVYKLEQVSEKGKAYTNYFGRCNVAEHEKLILLAQLKPEKDSDEAVTYSLGKFGQRALDFYSIHVTKESTHPVKPLAQIAGNRYASGPVGKALSDACMGTIASFLSKYQDIIIEHQKVVKGNQKRLESLRELAGKENLEYPSVTLPPQPHTKEGVDAYNEVIARVRMWVNLNLWQKLKLSRDDAKPLLRLKGFPSFPLVERQANEVDWWDMVCNVKKLINEKKEDGKVFWQNLAGYKRQEALRPYLSSEEDRKKGKKFARYQLGDLLLHLEKKHGEDWGKVYDEAWERIDKKVEGLSKHIKLEEERRSEDAQSKAALTDWLRAKASFVIEGLKEADKDEFCRCELKLQKWYGDLRGKPFAIEAENSILDISGFSKQYNCAFIWQKDGVKKLNLYLIINYFKGGKLRFKKIKPEAFEANRFYTVINKKSGEIVPMEVNFNFDDPNLIILPLAFGKRQGREFIWNDLLSLETGSLKLANGRVIEKTLYNRRTRQDEPALFVALTFERREVLDSSNIKPMNLIGVDRGENIPAVIALTDPEGCPLSRFKDSLGNPTHILRIGESYKEKQRTTQAKKEVEQRRAGGYSRKYASKAKNLADDMVRNTARDLLYYAVTQDAMLIFENLSRGFGRQGKRTFMAERQYTRMEDWLTAKLAYEGLSKTYLSKTLAQYTSKTCSNCGFTITSADYDRVLEKLKKTATGWMTTINGKELKVEGQITYYNRYKRQNVVKDLSVELDRLSEESVNNDISSWTKGRSGEALSLLKKRFSHRPVQEKFVCLNCGFETHADEQAALNIARSWLFLRSQEYKKYQTNKTTGNTDKRAFVETWQSFYRKKLKEVWKPAV

SEQ ID NO: 641 - protein, 977 aa, Artificial Sequence
  CasX Variant
QEIKRINKIRRRLVKDSNTKKAGKTGPMKTLLVRVMTPDLRERLENLRKKPENIPQPISNTSRANLNKLLTDYTEMKKAILHVYWEEFQKDPVGLMSRVAQPASKKIDQNKLKPEMDEKGNLTTAGFACSQCGQPLFVYKLEQVSEKGKAYTNYFGRCNVAEHEKLILLAQLKPEKDSDEAVTYSLGKFGQRALDFYSIHVTKESTHPVKPLAQIAGNRYASGPVGKALSDACMGTIASFLSKYQDIIIEHQKVVKGNQKRLESLRELAGKENLEYPSVTLPPQPHTKEGVDAYNEVIARVRMWVNLNLWQKLKLSRDDAKPLLRLKGFPSFPLVERQANEVDWWDMVCNVKKLINEKKEDGKVFWQNLAGYKRQEALRPYLSSEEDRKKGKKFARYQLGDLLLHLEKKHGEDWGKVYDEAWERIDKKVEGLSKHIKLEEERRSEDAQSKAALTDWLRAKASFVIEGLKEADKDEFCRCELKLQKWYGDLRGKPFAIEAENSILDISGFSKQYNCAFIWQKDGVKKLNLYLIINYFKGGKLRFKKIKPEAFEANRFYTVINKKSGEIVPMEVNFNFDDPNLIILPLAFGKRQGREFIWNDLLSLETGSLKLANGRVIEKTLYNRRTRQDEPALFVALTFERREVLDSSNIKPMNLIGVDRGENIPAVIALTDPEGCPLSRFKRSLGNPTHILRIGESYKEKQRTIQAKKEVEQRRAGGYSRKYASKAKNLADDMVRNTARDLLYYAVTQDAMLIFENLSRGFGRQGKRTFMAERQYTRMEDWLTAKLAYEGLSKTYLSKTLAQYTSKTCSNCGFTITSADYDRVLEKLKKTATGWMTTINGKELKVEGQITYYNRYKRQNVVKDLSVELDRLSEESVNNDISSWTKGRSGEALSLLKKRFSHRPVQEKFVCLNCGFETHADEQAALNIARSWLFLRSQEYKKYQTNKTTGNTDKRAFVETWQSFYRKKLKEVWKPAV

SEQ ID NO: 642 - protein, 977 aa, Artificial Sequence
  CasX Variant
QEIKRINKIRRRLVKDSNTKKAGKTYPMKTLLVRVMTPDLRERLENLRKKPENIPQPISNTSRANLNKLLTDYTEMKKAILHVYWEEFQKDPVGLMSRVAQPASKKIDQNKLKPEMDEKGNLTTAGFACSQCGQPLFVYKLEQVSEKGKAYTNYFGRCNVAEHEKLILLAQLKPEKDSDEAVTYSLGKFGQRALDFYSIHVTKESTHPVKPLAQIAGNRYASGPVGKALSDACMGTIASFLSKYQDIIIEHQKVVKGNQKRLESLRELAGKENLEYPSVTLPPQPHTKEGVDAYNEVIARVRMWVNLNLWQKLKLSRDDAKPLLRLKGFPSFPLVERQANEVDWWDMVCNVKKLINEKKEDGKVFWQNLAGYKRQEALRPYLSSEEDRKKGKKFARYQLGDLLLHLEKKHGEDWGKVYDEAWERIDKKVEGLSKHIKLEEERRSEDAQSKAALTDWLRAKASFVIEGLKEADKDEFCRCELKLQKWYGDLRGKPFAIEAENSILDISGFSKQYNCAFIWQKDGVKKLNLYLIINYFKGGKLRFKKIKPEAFEANRFYTVINKKSGEIVPMEVNFNFDDPNLIILPLAFGKRQGREFIWNDLLSLETGSLKLANGRVIEKTLYNRRTRQDEPALFVALTFERREVLDSSNIKPMNLIGVDRGENIPAVIALTDPEGCPLSRFKDSLGNPTHILRIGESYKEKQRTIQAKKEVEQRRAGGYSRKYASKAKNLADDMVRNTARDLLYYAVTQDAMLIFENLSRGFGRQGKRTFMAERQYTRMEDWLTAKLAYEGLSKTYLSKTLAQYTSKTCSNCGFTITSADYDRVLEKLKKTATGWMTTINGKELKVEGQITYYNRYKRQNVVKDLSVELDRLSEESVNNDISSWTKGRSGEALSLLKKRFSHRPVQEKFVCLNCGFETHADEQAALNIARSWLFLRSQEYKKYQTNKTTGNTDKRAFVETWQSFYRKKLKEVWKPAV

SEQ ID NO: 643 - protein, 977 aa, Artificial Sequence
  CasX Variant
QEIKRINKIRRRLVKDSNTKKAGKTGPMKTLLVRVMTPDLRERLENLRKKPENIPQPISNTSRANLNKLLTDYTEMKKAILHVYWEEFQKDPVGLMSRVAQPASKKIDQNKLKPEMDEKGNLTTAGFACSQCGQPLFVYKLEQVSEKGKAYTNYFGRCNVAEHEKLILLAQLKPEKDSDEAVTYSLGKFGQRALDFYSIHVTKESTHPVKPLAQIAGNRYASGPVGKALSDACMGTIASFLSKYQDIIIEHQKVVKGNQKRLESLRELAGKENLEYPSVTLPPQPHTKEGVDAYNEVIARVRMWVNLNLWQKLKLSRDDAKPLLRLKGFPSFPLVERQANEVDWWDMVCNVKKLINEKKEDGKVFWQNLAGYKRQEALRPYLSSEEDRKKGKKFARYQLGDLLLHLEKKHGEDWGKVYDEAWERIDKKVEGLSKHIKLEEERRSEDAQSKAALTDWLRAKASFVIEGLKEADKDEFCRCELKLQKWYGDLRGKPFAIEAENSILDISGFSKQYNCAFIWQKDGVKKLNLYLIINYFKGGKLRFKKIKPEAFEANRFYTVINKKSGEIVPMEVNFNFDDPNLIILPLAFGKRQGREFIWNDLLSLETGSLKLANGRVIEKTLYNRRTRQDEPALFVALTFERREVLDSSNIKPMNLIGVDRGENIPAVIALTDPEGCPLSRFKDSLGNPTHILRIGESYKEKQRTIQAKKEVEQRRAGGYSRKYASKAKNLADDMVRNTARDLLYYAVTQDAMLIFENLSRGFGRQGKRTFMAERQYTRMEDWLTAKLAYEGLSKTYLSKTLAQYTSKTCSNCGFTIHSADYDRVLEKLKKTATGWMTTINGKELKVEGQITYYNRYKRQNVVKDLSVELDRLSEESVNNDISSWTKGRSGEALSLLKKRFSHRPVQEKFVCLNCGFETHADEQAALNIARSWLFLRSQEYKKYQTNKTTGNTDKRAFVETWQSFYRKKLKEVWKPAV

SEQ ID NO: 644 - protein, 977 aa, Artificial Sequence
  CasX Variant
QEIKRINKIRRRLVKDSNTKKAGKTGPMKTLLVRVMTPDLRERLENLRKKPENIPQPISNTSRANLNKLLTDYTEMKKAILHVYWEEFQKDPVGLMSRVAQPASKKIDQNKLKPEMDEKGNLTTAGFACSQCGQPLFVYKLEQVSEKGKAYTNYFGRCNVAEHEKLILLAQLKPEKDSDEAVTYSLGKFGQRALDFYSIHVTKESTHPVKPLAQIAGNRYASGPVGKALSDACMGTIASFLSKYQDIIIEHQKVVKGNQKRLESLRELAGKENLEYPSVTLPPQPHTKEGVDAYNEVIARVRMWVNLNLWQKLKLSRDDAKPLLRLKGFPSFPLVERQANEVDWWDMVCNVKKLINEKKEDGKVFWQNLAGYKRQEALRPYLSSEEDRKKGKKFARYQLGDLLLHLEKKHGEDWGKVYDEAWERIDKKVEGLSKHIKLEEERRSEDAQSKAALTDWLRAKASFVIEGLKEADKDEFCRCELKLQKWYGDLRGKPFAIEAENSILDISGFSKQYNCAFIWQKDGVKKLNLYLIINYFKGGKLRFKKIKPEAFEANRFYTVINKKSGEIVPMEVNFNFDDPNLIILPLAFGKRQGREFIWNDLLSLETGSLKLANGRVIEKTLYNRRTRQDEPALFVALTFERREVLDSSNIKPMNLIGVDRGENIPAVIALTDPEGCPLSRFKDSLGNPTHILRIGESYKEKQRTIQAKKEVEQRRAGGYSRKYASKAKNLADDMVRNTARDLLYYAATQDAMLIFENLSRGFGRQGKRTFMAERQYTRMEDWLTAKLAYEGLSKTYLSKTLAQYTSKTCSNCGFTITSADYDRVLEKLKKTATGWMTTINGKELKVEGQITYYNRYKRQNVVKDLSVELDRLSEESVNNDISSWTKGRSGEALSLLKKRFSHRPVQEKFVCLNCGFETHADEQAALNIARSWLFLRSQEYKKYQTNKTTGNTDKRAFVETWQSFYRKKLKEVWKPAV

SEQ ID NO: 645 - protein, 977 aa, Artificial Sequence
  CasX Variant
QEIKRINKIRRRLVKDSNTKKAGKTGPMKTLLVRVMTPDLRERLENLRKKPENIPQPISNTSRANLNKLLTDYTEMKKAILHVYWEEFQKDPVGLMSRVAQPASKKIDQNKLKPEMDEKGNLTTAGFACSQCGQPLFVYKLEQVSEKGKAYTNYFGRCNVAEHEKLILLAQLKPEKDSDEAVTYSLGKFGQRALDFYSIHVTKESTHPVKPLAQIAGNRYASGPVGKALSDACMGTIASFLSKYQDIIIEHQKVVKGNQKRLESLRELAGKENLEYPSVTLPPQPHTKEGVDAYNEVIARVRMWVNLNLWQKLKLSRDDAKPLLRLKGFPSFPLVERQANEVDWWDMVCNVKKLINEKKEDGKVFWQNLAGYKRQEALRPYLSSEEDRKKGKKFARYQLGDLLLHLEKKHGEDWGKVYDEAWERIDKKVEGLSKHIKLEEERRSEDAQSKAALTDWLRAKASFVIEGLKEADKDEFCRCELKLQKWYGDLRGKPFAIEAENSILDISGFSKQYNCAFIWQKDGVKKLNLYLIINYFKGGKLRFKKIKPEAFEANRFYTVINKKSGEIVPMEVNFNFDDPNLIILPLAFGKRQGREFIWNDLLSLETGSLKLANGRVIEKTLYNRRTRQDEPALFVALTFERREVLDSSNIKPMNLIGVDRGENIPAVIALTDPEGCPLSRFKDSLGNPTHILRIGESYKEKQRTIQAAKEVEQRRAGGYSRKYASKAKNLADDMVRNTARDLLYYAVTQDAMLIFENLSRGFGRQGKRTFMAERQYTRMEDWLTAKLAYEGLSKTYLSKTLAQYTSKTCSNCGFTITSADYDRVLEKLKKTATGWMTTINGKELKVEGQITYYNRYKRQNVVKDLSVELDRLSEESVNNDISSWTKGRSGEALSLLKKRFSHRPVQEKFVCLNCGFETHADEQAALNIARSWLFLRSQEYKKYQTNKTTGNTDKRAFVETWQSFYRKKLKEVWKPAV

SEQ ID NO: 646 - protein, 978 aa, Artificial Sequence
  CasX Variant
QEIKRINKIRRRLVKDSNTKKAGKTRGPMKTLLVRVMTPDLRERLENLRKKPENIPQPISNTSRANLNKLLTDYTEMKKAILHVYWEEFQKDPVGLMSRVAQPASKKIDQNKLKPEMDEKGNLTTAGFACSQCGQPLFVYKLEQVSEKGKAYTNYFGRCNVAEHEKLILLAQLKPEKDSDEAVTYSLGKFGQRALDFYSIHVTKESTHPVKPLAQIAGNRYASGPVGKALSDACMGTIASFLSKYQDIIIEHQKVVKGNQKRLESLRELAGKENLEYPSVTLPPQPHTKEGVDAYNEVIARVRMWVNLNLWQKLKLSRDDAKPLLRLKGFPSFPLVERQANEVDWWDMVCNVKKLINEKKEDGKVFWQNLAGYKRQEALRPYLSSEEDRKKGKKFARYQLGDLLLHLEKKHGEDWGKVYDEAWERIDKKVEGLSKHIKLEEERRSEDAQSKAALTDWLRAKASFVIEGLKEADKDEFCRCELKLQKWYGDLRGKPFAIEAENSILDISGFSKQYNCAFIWQKDGVKKLNLYLIINYFKGGKLRFKKIKPEAFEANRFYTVINKKSGEIVPMEVNFNFDDPNLIILPLAFGKRQGREFIWNDLLSLETGSLKLANGRVIEKTLYNRRTRQDEPALFVALTFERREVLDSSNIKPMNLIGVDRGENIPAVIALTDPEGCPLSRFKDSLGNPTHILRIGESYKEKQRTIQAKKEVEQRRAGGYSRKYASKAKNLADDMVRNTARDLLYYAVTQDAMLIFENLSRGFGRQGKRTFMAERQYTRMEDWLTAKLAYEGLSKTYLSKTLAQYTSKTCSNCGFTITSADYDRVLEKLKKTATGWMTTINGKELKVEGQITYYNRYKRQNVVKDLSVELDRLSEESVNNDISSWTKGRSGEALSLLKKRFSHRPVQEKFVCLNCGFETHADEQAALNIARSWLFLRSQEYKKYQTNKTTGNTDKRAFVETWQSFYRKKLKEVWKPAV

SEQ ID NO: 647 - protein, 978 aa, Artificial Sequence
  CasX Variant
QEIKRINKIRRRLVKDSNTKKAGKTGPMKTLLVRVMTPDLRERLENLRKKPENIPQPISNTSRANLNKLLTDYTEMKKAILHVYWEEFQKDPVGLMSRVAQPASKKIDQNKLKPEMDEKGNLTTAGFACSQCGQPLFVYKLEQVSEKGKAYTNYFGRCNVAEHEKLILLAQLKPEKDSDEAVTYSLGKFGQRALDFYSIHVTKESTHPVKPLAQIAGNRYASYPVGKALSDACMGTIASFLSKYQDIIIEHQKVVKGNQKRLESLRELAGKENLEYPSVTLPPQPHTKEGVDAYNEVIARVRMWVNLNLWQKLKLSRDDAKPLLRLKGFPSFPLVERQANEVDWWDMVCNVKKLINEKKEDGKVFWQNLAGYKRQEALRPYLSSEEDRKKGKKFARYQLGDLLLHLEKKHGEDWGKVYDEAWERIDKKVEGLSKHIKLEEERRSEDAQSKAALTDWLRAKASFVIEGLKEADKDEFCRCELKLQKWYGDLRGKPFAIEAENSILDISGFSKQYNCAFIWQKDGVKKLNLYLIINYFKGGKLRFKKIKPEAFEANRFYTVINKKSGEIVPMEVNFNFDDPNLIILPLAFGKRQGREFIWNDLLSLETGSLKLANGRVIEKTLYNRRTRQDEPALFVALTFERREVLDSSNIKPMNLIGVDRGENIPAVIALTDPEGCPLSRFKDSLGNPTHILRIGESYKEKQRTIQAKKEVEQRRAGGYSRKYASKAKNLADDMVRNTARDLLYYAVTQDAMLIFENLSRGFGRQGKRTFMAERQYTRMEDWLTAKLAYEGLPSKTYLSKTLAQYTSKTCSNCGFTITSADYDRVLEKLKKTATGWMTTINGKELKVEGQITYYNRYKRQNVVKDLSVELDRLSEESVNNDISSWTKGRSGEALSLLKKRFSHRPVQEKFVCLNCGFETHADEQAALNIARSWLFLRSQEYKKYQTNKTTGNTDKRAFVETWQSFYRKKLKEVWKPAV

SEQ ID NO: 648 - protein, 978 aa, Artificial Sequence
  CasX Variant
QEIKRINKIRRRLVKDSNTKKAGKTGPMKTLLVRVMTPDLRERLENLRKKPENIPQPISNTSRANLNKLLTDYTEMKKAILHVYWEEFQKDPVGLMSRVAQPASKKIDQNKLKPEMDEKGNLTTAGFACSQCGQPLFVYKLEQVSEKGKAYTNYFGRCNVAEHEKLILLAQLKPEKDSDEAVTYSLGKFGQRALDFYSIHVTKESTHPVKPLAQIAGNRYASNPVGKALSDACMGTIASFLSKYQDIIIEHQKVVKGNQKRLESLRELAGKENLEYPSVTLPPQPHTKEGVDAYNEVIARVRMWVNLNLWQKLKLSRDDAKPLLRLKGFPSFPLVERQANEVDWWDMVCNVKKLINEKKEDGKVFWQNLAGYKRQEALRPYLSSEEDRKKGKKFARYQLGDLLLHLEKKHGEDWGKVYDEAWERIDKKVEGLSKHIKLEEERRSEDAQSKAALTDWLRAKASFVIEGLKEADKDEFCRCELKLQKWYGDLRGKPFAIEAENSILDISGFSKQYNCAFIWQKDGVKKLNLYLIINYFKGGKLRFKKIKPEAFEANRFYTVINKKSGEIVPMEVNFNFDDPNLIILPLAFGKRQGREFIWNDLLSLETGSLKLANGRVIEKTLYNRRTRQDEPALFVALTFERREVLDSSNIKPMNLIGVDRGENIPAVIALTDPEGCPLSRFKDSLGNPTHILRIGESYKEKQRTIQAKKEVEQRRAGGYSRKYASKAKNLADDMVRNTARDLLYYAVTQDAMLIFENLSRGFGRQGKRTFMAERQYTRMEDWLTAKLAYEGLPSKTYLSKTLAQYTSKTCSNCGFTITSADYDRVLEKLKKTATGWMTTINGKELKVEGQITYYNRYKRQNVVKDLSVELDRLSEESVNNDISSWTKGRSGEALSLLKKRFSHRPVQEKFVCLNCGFETHADEQAALNIARSWLFLRSQEYKKYQTNKTTGNTDKRAFVETWQSFYRKKLKEVWKPAV

SEQ ID NO: 649 - protein, 979 aa, Artificial Sequence
  CasX Variant
QEIKRINKIRRRLVKDSNTKKAGKTGPMKTLLVRVMTPDLRERLENLRKKPENIPQPISNTSRANLNKLLTDYTEMKKAILHVYWEEFQKDPVGLMSRVAQPASKKIDQNKLKPEMDEKGNLTTAGFACSQCGQPLFVYKLEQVSEKGKAYTNYFGRCNVAEHEKLILLAQLKPEKDSDEAVTYSLGKFGQRALDFYSIHVTKESTHPVKPLAQIAGNRYASGPVGKALSDACMGTIASFLSKYQDIIIEHQKVVKGNQKRLESLRELAGKENLEYPSVTLPPQPHTKEGVDAYNEVIARVRMWVNLNLWQKLKLSRDDAKPLLRLKGFPSFPLVERQANEVDWWDMVCNVKKLINEKKEDGKVFWQNLAGYKRQEALRPYLSSEEDRKKGKKFARYQLGDLLLHLEKKHGEDWGKVYDEAWERIDKKVEGLSKHIKLEEERRSEDAQSKAALTDWLRAKASFVIEGLKEADKDEFCRCELKLQKWYGDLRGKPFAIEAENSILDISGFSKQYNCAFIWQKDGVKKLNLYLIINYFKGWGKLRFKKIKPEAFEANRFYTVINKKSGEIVPMEVNFNFDDPNLIILPLAFGKRQGREFIWNDLLSLETGSLKLANGRVIEKTLYNRRTRQDEPALFVALTFERREVLDSSNIKPMNLIGVDRGENIPAVIALTDPEGCPLSRFKDSLGNPTHILRIGESYKEKQRTIQAKKEVEQRRAGGYSRKYASKAKNLADDMVRNTARDLLYYAVTQDAMLIFENLSRGFGRQGKRTFMAERQYTRMEDWLTAKLAYEGLPSKTYLSKTLAQYTSKTCSNCGFTITSADYDRVLEKLKKTATGWMTTINGKELKVEGQITYYNRYKRQNVVKDLSVELDRLSEESVNNDISSWTKGRSGEALSLLKKRFSHRPVQEKFVCLNCGFETHADEQAALNIARSWLFLRSQEYKKYQTNKTTGNTDKRAFVETWQSFYRKKLKEVWKPAV

SEQ ID NO: 650 - protein, 979 aa, Artificial Sequence
  CasX Variant
QEIKRINKIRRRLVKDSNTKKAGKTGPMKTLLVRVMTPDLRERLENLRKKPENIPQPISNTSRANLNKLLTDYTEMKKAILHVYWEEFQKDPVGLMSRVAQPASKKIDQNKLKPEMDEKGNLTTAGFACSQCGQPLFVYKLEQVSEKGKAYTNYFGRCNVAEHEKLILLAQLKPEKDSDEAVTYSLGKFGQRALDFYSIHVTKESTHPVKPLAQIAGNRYASGPVGKALSDACMGTIASFLSKYQDIIIEHQKVVKGNQKRLESLRELAGKENLEYPSVTLPPQPHTKEGVDAYNEVIARVRMWVNLNLWQKLKLSRDDAKPLLRLKGFPSFPLVERQANEVDWWDMVCNVKKLINEKKEDGKVFWQNLAGYKRQEALRPYLSSEEDRKKGKKFARYQLGDLLLHLEKKHGEDWGKVYDEAWERIDKKVEGLSKHIKLEEERRSEDAQSKAALTDWLRAKASFVIEGLKEADKDEFCRCELKLQKWYGDLRGKPFAIEAENSILDISGFSKQYNCAFIWQKDGVKKLNLYLIINYFKGYGKLRFKKIKPEAFEANRFYTVINKKSGEIVPMEVNFNFDDPNLIILPLAFGKRQGREFIWNDLLSLETGSLKLANGRVIEKTLYNRRTRQDEPALFVALTFERREVLDSSNIKPMNLIGVDRGENIPAVIALTDPEGCPLSRFKDSLGNPTHILRIGESYKEKQRTIQAKKEVEQRRAGGYSRKYASKAKNLADDMVRNTARDLLYYAVTQDAMLIFENLSRGFGRQGKRTFMAERQYTRMEDWLTAKLAYEGLPSKTYLSKTLAQYTSKTCSNCGFTITSADYDRVLEKLKKTATGWMTTINGKELKVEGQITYYNRYKRQNVVKDLSVELDRLSEESVNNDISSWTKGRSGEALSLLKKRFSHRPVQEKFVCLNCGFETHADEQAALNIARSWLFLRSQEYKKYQTNKTTGNTDKRAFVETWQSFYRKKLKEVWKPAV

SEQ ID NO: 651 - protein, 979 aa, Artificial Sequence
  CasX Variant
QEIKRINKIRRRLVKDSNTKKAGKTRGPMKTLLVRVMTPDLRERLENLRKKPENIPQPISNTSRANLNKLLTDYTEMKKAILHVYWEEFQKDPVGLMSRVAQPASKKIDQNKLKPEMDEKGNLTTAGFACSQCGQPLFVYKLEQVSEKGKAYTNYFGRCNVAEHEKLILLAQLKPEKDSDEAVTYSLGKFGQRALDFYSIHVTKESTHPVKPLAQIAGNRYASGPVGKALSDACMGTIASFLSKYQDIIIEHQKVVKGNQKRLESLRELAGKENLEYPSVTLPPQPHTKEGVDAYNEVIARVRMWVNLNLWQKLKLSRDDAKPLLRLKGFPSFPLVERQANEVDWWDMVCNVKKLINEKKEDGKVFWQNLAGYKRQEALRPYLSSEEDRKKGKKFARYQLGDLLLHLEKKHGEDWGKVYDEAWERIDKKVEGLSKHIKLEEERRSEDAQSKAALTDWLRAKASFVIEGLKEADKDEFCRCELKLQKWYGDLRGKPFAIEAENSILDISGFSKQYNCAFIWQKDGVKKLNLYLIINYFKGGKLRFKKIKPEAFEANRFYTVINKKSGEIVPMEVNFNFDDPNLIILPLAFGKRQGREFIWNDLLSLETGSLKLANGRVIEKTLYNRRTRQDEPALFVALTFERREVLDSSNIKPMNLIGVDRGENIPAVIALTDPEGCPLSRFKDSLGNPTHILRIGESYKEKQRTIQAKKEVEQRRAGGYSRKYASKAKNLADDMVRNTARDLLYYAVTQDAMLIFENLSRGFGRQGKRTFMAERQYTRMEDWLTAKLAYEGLPSKTYLSKTLAQYTSKTCSNCGFTITSADYDRVLEKLKKTATGWMTTINGKELKVEGQITYYNRYKRQNVVKDLSVELDRLSEESVNNDISSWTKGRSGEALSLLKKRFSHRPVQEKFVCLNCGFETHADEQAALNIARSWLFLRSQEYKKYQTNKTTGNTDKRAFVETWQSFYRKKLKEVWKPAV

SEQ ID NO: 652 - protein, 979 aa, Artificial Sequence
  CasX Variant
QEIKRINKIRRRLVKDSNTKKAGKTRGPMKTLLVRVMTPDLRERLENLRKKPENIPQPISNTSRANLNKLLTDYTEMKKAILHVYWEEFQKDPVGLMSRVAQPASKKIDQNKLKPEMDEKGNLTTAGFACSQCGQPLFVYKLEQVSEKGKAYTNYFGRCNVAEHEKLILLAQLKPEKDSDEAVTYSLGKFGQRALDFYSIHVTKESTHPVKPLAQIAGNRYASYPVGKALSDACMGTIASFLSKYQDIIIEHQKVVKGNQKRLESLRELAGKENLEYPSVTLPPQPHTKEGVDAYNEVIARVRMWVNLNLWQKLKLSRDDAKPLLRLKGFPSFPLVERQANEVDWWDMVCNVKKLINEKKEDGKVFWQNLAGYKRQEALRPYLSSEEDRKKGKKFARYQLGDLLLHLEKKHGEDWGKVYDEAWERIDKKVEGLSKHIKLEEERRSEDAQSKAALTDWLRAKASFVIEGLKEADKDEFCRCELKLQKWYGDLRGKPFAIEAENSILDISGFSKQYNCAFIWQKDGVKKLNLYLIINYFKGGKLRFKKIKPEAFEANRFYTVINKKSGEIVPMEVNFNFDDPNLIILPLAFGKRQGREFIWNDLLSLETGSLKLANGRVIEKTLYNRRTRQDEPALFVALTFERREVLDSSNIKPMNLIGVDRGENIPAVIALTDPEGCPLSRFKDSLGNPTHILRIGESYKEKQRTIQAKKEVEQRRAGGYSRKYASKAKNLADDMVRNTARDLLYYAVTQDAMLIFENLSRGFGRQGKRTFMAERQYTRMEDWLTAKLAYEGLPSKTYLSKTLAQYTSKTCSNCGFTITSADYDRVLEKLKKTATGWMTTINGKELKVEGQITYYNRYKRQNVVKDLSVELDRLSEESVNNDISSWTKGRSGEALSLLKKRFSHRPVQEKFVCLNCGFETHADEQAALNIARSWLFLRSQEYKKYQTNKTTGNTDKRAFVETWQSFYRKKLKEVWKPAV

SEQ ID NO: 653 - protein, 978 aa, Artificial Sequence
  CasX Variant
QEIKRINKIRRRLVKDSNTKKAGKTGPMKTLLVRVMTPDLRERLENLRKKPENIPQPISNTSRANLNKLLTDYTEMKKAILHVYWEEFQKDPVGLMSRVAQPASKKIDQNKLKPEMDEKGNLTTAGFACSQCGQPLFVYKLEQVSEKGKAYTNYFGRCNVAEHEKLILLAQLKPEKDSDEAVTYSLGKFGQRALDFYSIHVTKESTHPVKPLAQIAGNRYASHPVGKALSDACMGTIASFLSKYQDIIIEHQKVVKGNQKRLESLRELAGKENLEYPSVTLPPQPHTKEGVDAYNEVIARVRMWVNLNLWQKLKLSRDDAKPLLRLKGFPSFPLVERQANEVDWWDMVCNVKKLINEKKEDGKVFWQNLAGYKRQEALRPYLSSEEDRKKGKKFARYQLGDLLLHLEKKHGEDWGKVYDEAWERIDKKVEGLSKHIKLEEERRSEDAQSKAALTDWLRAKASFVIEGLKEADKDEFCRCELKLQKWYGDLRGKPFAIEAENSILDISGFSKQYNCAFIWQKDGVKKLNLYLIINYFKGGKLRFKKIKPEAFEANRFYTVINKKSGEIVPMEVNFNFDDPNLIILPLAFGKRQGREFIWNDLLSLETGSLKLANGRVIEKTLYNRRTRQDEPALFVALTFERREVLDSSNIKPMNLIGVDRGENIPAVIALTDPEGCPLSRFKDSLGNPTHILRIGESYKEKQRTIQAKKEVEQRRAGGYSRKYASKAKNLADDMVRNTARDLLYYAVTQDAMLIFENLSRGFGRQGKRTFMAERQYTRMEDWLTAKLAYEGLPSKTYLSKTLAQYTSKTCSNCGFTITSADYDRVLEKLKKTATGWMTTINGKELKVEGQITYYNRYKRQNVVKDLSVELDRLSEESVNNDISSWTKGRSGEALSLLKKRFSHRPVQEKFVCLNCGFETHADEQAALNIARSWLFLRSQEYKKYQTNKTTGNTDKRAFVETWQSFYRKKLKEVWKPAV

SEQ ID NO: 654 - protein, 978 aa, Artificial Sequence
  CasX Variant
QEIKRINKIRRRLVKDSNTKKAGKTGPMKTLLVRVMTPDLRERLENLRKKPENIPQPISNTSRANLNKLLTDYTEMKKAILHVYWEEFQKDPVGLMSRVAQPASKKIDQNKLKPEMDEKGNLTTAGFACSQCGQPLFVYKLEQVSEKGKAYTNYFGRCNVAEHEKLILLAQLKPEKDSDEAVTYSLGKFGQRALDFYSIHVTKESTHPVKPLAQIAGNRYASSPVGKALSDACMGTIASFLSKYQDIIIEHQKVVKGNQKRLESLRELAGKENLEYPSVTLPPQPHTKEGVDAYNEVIARVRMWVNLNLWQKLKLSRDDAKPLLRLKGFPSFPLVERQANEVDWWDMVCNVKKLINEKKEDGKVFWQNLAGYKRQEALRPYLSSEEDRKKGKKFARYQLGDLLLHLEKKHGEDWGKVYDEAWERIDKKVEGLSKHIKLEEERRSEDAQSKAALTDWLRAKASFVIEGLKEADKDEFCRCELKLQKWYGDLRGKPFAIEAENSILDISGFSKQYNCAFIWQKDGVKKLNLYLIINYFKGGKLRFKKIKPEAFEANRFYTVINKKSGEIVPMEVNFNFDDPNLIILPLAFGKRQGREFIWNDLLSLETGSLKLANGRVIEKTLYNRRTRQDEPALFVALTFERREVLDSSNIKPMNLIGVDRGENIPAVIALTDPEGCPLSRFKDSLGNPTHILRIGESYKEKQRTIQAKKEVEQRRAGGYSRKYASKAKNLADDMVRNTARDLLYYAVTQDAMLIFENLSRGFGRQGKRTFMAERQYTRMEDWLTAKLAYEGLPSKTYLSKTLAQYTSKTCSNCGFTITSADYDRVLEKLKKTATGWMTTINGKELKVEGQITYYNRYKRQNVVKDLSVELDRLSEESVNNDISSWTKGRSGEALSLLKKRFSHRPVQEKFVCLNCGFETHADEQAALNIARSWLFLRSQEYKKYQTNKTTGNTDKRAFVETWQSFYRKKLKEVWKPAV

SEQ ID NO: 655 - protein, 978 aa, Artificial Sequence
  CasX Variant
QEIKRINKIRRRLVKDSNTKKAGKTGPMKTLLVRVMTPDLRERLENLRKKPENIPQPISNTSRANLNKLLTDYTEMKKAILHVYWEEFQKDPVGLMSRVAQPASKKIDQNKLKPEMDEKGNLTTAGFACSQCGQPLFVYKLEQVSEKGKAYTNYFGRCNVAEHEKLILLAQLKPEKDSDEAVTYSLGKFGQRALDFYSIHVTKESTHPVKPLAQIAGNRYASTPVGKALSDACMGTIASFLSKYQDIIIEHQKVVKGNQKRLESLRELAGKENLEYPSVTLPPQPHTKEGVDAYNEVIARVRMWVNLNLWQKLKLSRDDAKPLLRLKGFPSFPLVERQANEVDWWDMVCNVKKLINEKKEDGKVFWQNLAGYKRQEALRPYLSSEEDRKKGKKFARYQLGDLLLHLEKKHGEDWGKVYDEAWERIDKKVEGLSKHIKLEEERRSEDAQSKAALTDWLRAKASFVIEGLKEADKDEFCRCELKLQKWYGDLRGKPFAIEAENSILDISGFSKQYNCAFIWQKDGVKKLNLYLIINYFKGGKLRFKKIKPEAFEANRFYTVINKKSGEIVPMEVNFNFDDPNLIILPLAFGKRQGREFIWNDLLSLETGSLKLANGRVIEKTLYNRRTRQDEPALFVALTFERREVLDSSNIKPMNLIGVDRGENIPAVIALTDPEGCPLSRFKDSLGNPTHILRIGESYKEKQRTIQAKKEVEQRRAGGYSRKYASKAKNLADDMVRNTARDLLYYAVTQDAMLIFENLSRGFGRQGKRTFMAERQYTRMEDWLTAKLAYEGLPSKTYLSKTLAQYTSKTCSNCGFTITSADYDRVLEKLKKTATGWMTTINGKELKVEGQITYYNRYKRQNVVKDLSVELDRLSEESVNNDISSWTKGRSGEALSLLKKRFSHRPVQEKFVCLNCGFETHADEQAALNIARSWLFLRSQEYKKYQTNKTTGNTDKRAFVETWQSFYRKKLKEVWKPAV

SEQ ID NO: 656 - protein, 978 aa, Artificial Sequence
  CasX Variant
QEIKRINKIRRRLVKDSNTKKAGKTGPMKTLLVRVMTPDLRERLENLRKKPENIPQPISNTSRANLNKLLTDYTEMKKAILHVYWEEFQKDPVGLMSRVAQPASKKIDQNKLKPEMDEKGNLTTAGFACSQCGQPLFVYKLEQVSEKGKAYTNYFGRCNVAEHEKLILLAQLKPEKDSDEAVTYSLGKFGQRALDFYSIHVTKESTHPVKPLAQIAGNRYASAPVGKALSDACMGTIASFLSKYQDIIIEHQKVVKGNQKRLESLRELAGKENLEYPSVTLPPQPHTKEGVDAYNEVIARVRMWVNLNLWQKLKLSRDDAKPLLRLKGFPSFPLVERQANEVDWWDMVCNVKKLINEKKEDGKVFWQNLAGYKRQEALRPYLSSEEDRKKGKKFARYQLGDLLLHLEKKHGEDWGKVYDEAWERIDKKVEGLSKHIKLEEERRSEDAQSKAALTDWLRAKASFVIEGLKEADKDEFCRCELKLQKWYGDLRGKPFAIEAENSILDISGFSKQYNCAFIWQKDGVKKLNLYLIINYFKGGKLRFKKIKPEAFEANRFYTVINKKSGEIVPMEVNFNFDDPNLIILPLAFGKRQGREFIWNDLLSLETGSLKLANGRVIEKTLYNRRTRQDEPALFVALTFERREVLDSSNIKPMNLIGVDRGENIPAVIALTDPEGCPLSRFKDSLGNPTHILRIGESYKEKQRTIQAKKEVEQRRAGGYSRKYASKAKNLADDMVRNTARDLLYYAVTQDAMLIFENLSRGFGRQGKRTFMAERQYTRMEDWLTAKLAYEGLPSKTYLSKTLAQYTSKTCSNCGFTITSADYDRVLEKLKKTATGWMTTINGKELKVEGQITYYNRYKRQNVVKDLSVELDRLSEESVNNDISSWTKGRSGEALSLLKKRFSHRPVQEKFVCLNCGFETHADEQAALNIARSWLFLRSQEYKKYQTNKTTGNTDKRAFVETWQSFYRKKLKEVWKPAV

SEQ ID NO: 657 - protein, 978 aa, Artificial Sequence
  CasX Variant
QEIKRINKIRRRLVKDSNTKKAGKTGPMKTLLVRVMTPDLRERLENLRKKPENIPQPISNTSRANLNKLLTDYTEMKKAILHVYWEEFQKDPVGLMSRVAQPASKKIDQNKLKPEMDEKGNLTTAGFACSQCGQPLFVYKLEQVSEKGKAYTNYFGRCNVAEHEKLILLAQLKPEKDSDEAVTYSLGKFGQRALDFYSIHVTKESTHPVKPLAQIAGNRYASVPVGKALSDACMGTIASFLSKYQDIIIEHQKVVKGNQKRLESLRELAGKENLEYPSVTLPPQPHTKEGVDAYNEVIARVRMWVNLNLWQKLKLSRDDAKPLLRLKGFPSFPLVERQANEVDWWDMVCNVKKLINEKKEDGKVFWQNLAGYKRQEALRPYLSSEEDRKKGKKFARYQLGDLLLHLEKKHGEDWGKVYDEAWERIDKKVEGLSKHIKLEEERRSEDAQSKAALTDWLRAKASFVIEGLKEADKDEFCRCELKLQKWYGDLRGKPFAIEAENSILDISGFSKQYNCAFIWQKDGVKKLNLYLIINYFKGGKLRFKKIKPEAFEANRFYTVINKKSGEIVPMEVNFNFDDPNLIILPLAFGKRQGREFIWNDLLSLETGSLKLANGRVIEKTLYNRRTRQDEPALFVALTFERREVLDSSNIKPMNLIGVDRGENIPAVIALTDPEGCPLSRFKDSLGNPTHILRIGESYKEKQRTIQAKKEVEQRRAGGYSRKYASKAKNLADDMVRNTARDLLYYAVTQDAMLIFENLSRGFGRQGKRTFMAERQYTRMEDWLTAKLAYEGLPSKTYLSKTLAQYTSKTCSNCGFTITSADYDRVLEKLKKTATGWMTTINGKELKVEGQITYYNRYKRQNVVKDLSVELDRLSEESVNNDISSWTKGRSGEALSLLKKRFSHRPVQEKFVCLNCGFETHADEQAALNIARSWLFLRSQEYKKYQTNKTTGNTDKRAFVETWQSFYRKKLKEVWKPAV

SEQ ID NO: 658 - protein, 978 aa, Artificial Sequence
  CasX Variant
QEIKRINKIRRRLVKDSNTKKAGKTGPMKTLLVRVMTPDLRERLENLRKKPENIPQPISNTSRANLNKLLTDYTEMKKAILHVYWEEFQKDPVGLMSRVAQPASKKIDQNKLKPEMDEKGNLTTAGFACSQCGQPLFVYKLEQVSEKGKAYTNYFGRCNVAEHEKLILLAQLKPEKDSDEAVTYSLGKFGQRALDFYSIHVTKESTHPVKPLAQIAGNRYASGPVGKALSLACMGTIASFLSKYQDIIIEHQKVVKGNQKRLESLRELAGKENLEYPSVTLPPQPHTKEGVDAYNEVIARVRMWVNLNLWQKLKLSRDDAKPLLRLKGFPSFPLVERQANEVDWWDMVCNVKKLINEKKEDGKVFWQNLAGYKRQEALRPYLSSEEDRKKGKKFARYQLGDLLLHLEKKHGEDWGKVYDEAWERIDKKVEGLSKHIKLEEERRSEDAQSKAALTDWLRAKASFVIEGLKEADKDEFCRCELKLQKWYGDLRGKPFAIEAENSILDISGFSKQYNCAFIWQKDGVKKLNLYLIINYFKGGKLRFKKIKPEAFEANRFYTVINKKSGEIVPMEVNFNFDDPNLIILPLAFGKRQGREFIWNDLLSLETGSLKLANGRVIEKTLYNRRTRQDEPALFVALTFERREVLDSSNIKPMNLIGVDRGENIPAVIALTDPEGCPLSRFKDSLGNPTHILRIGESYKEKQRTIQAKKEVEQRRAGGYSRKYASKAKNLADDMVRNTARDLLYYAVTQDAMLIFENLSRGFGRQGKRTFMAERQYTRMEDWLTAKLAYEGLPSKTYLSKTLAQYTSKTCSNCGFTITSADYDRVLEKLKKTATGWMTTINGKELKVEGQITYYNRYKRQNVVKDLSVELDRLSEESVNNDISSWTKGRSGEALSLLKKRFSHRPVQEKFVCLNCGFETHADEQAALNIARSWLFLRSQEYKKYQTNKTTGNTDKRAFVETWQSFYRKKLKEVWKPAV

SEQ ID NO: 659 - protein, 978 aa, Artificial Sequence
  CasX Variant
QEIKRINKIRRRLVKDSNTKKAGKTGPMKTLLVRVMTPDLRERLENLRKKPENIPQPISNTSRANLNKLLTDYTEMKKAILHVYWEEFQKDPVGLMSRVAQPASKKIDQNKLKPEMDEKGNLTTAGFACSQCGQPLFVYKLEQVSEKGKAYTNYFGRCNVAEHEKLILLAQLKPEKDSDEAVTYSLGKFGQRALDFYSIHVTKESTHPVKPLAQIAGNRYASGPVGKALSNACMGTIASFLSKYQDIIIEHQKVVKGNQKRLESLRELAGKENLEYPSVTLPPQPHTKEGVDAYNEVIARVRMWVNLNLWQKLKLSRDDAKPLLRLKGFPSFPLVERQANEVDWWDMVCNVKKLINEKKEDGKVFWQNLAGYKRQEALRPYLSSEEDRKKGKKFARYQLGDLLLHLEKKHGEDWGKVYDEAWERIDKKVEGLSKHIKLEEERRSEDAQSKAALTDWLRAKASFVIEGLKEADKDEFCRCELKLQKWYGDLRGKPFAIEAENSILDISGFSKQYNCAFIWQKDGVKKLNLYLIINYFKGGKLRFKKIKPEAFEANRFYTVINKKSGEIVPMEVNFNFDDPNLIILPLAFGKRQGREFIWNDLLSLETGSLKLANGRVIEKTLYNRRTRQDEPALFVALTFERREVLDSSNIKPMNLIGVDRGENIPAVIALTDPEGCPLSRFKDSLGNPTHILRIGESYKEKQRTIQAKKEVEQRRAGGYSRKYASKAKNLADDMVRNTARDLLYYAVTQDAMLIFENLSRGFGRQGKRTFMAERQYTRMEDWLTAKLAYEGLPSKTYLSKTLAQYTSKTCSNCGFTITSADYDRVLEKLKKTATGWMTTINGKELKVEGQITYYNRYKRQNVVKDLSVELDRLSEESVNNDISSWTKGRSGEALSLLKKRFSHRPVQEKFVCLNCGFETHADEQAALNIARSWLFLRSQEYKKYQTNKTTGNTDKRAFVETWQSFYRKKLKEVWKPAV

SEQ ID NO: 660 - protein, 978 aa, Artificial Sequence
  CasX Variant
QEIKRINKIRRRLVKDSNTKKAGKTGPMKTLLVRVMTPDLRERLENLRKKPENIPQPISNTSRANLNKLLTDYTEMKKAILHVYWEEFQKDPVGLMSRVAQPASKKIDQNKLKPEMDEKGNLTTAGFACSQCGQPLFVYKLEQVSEKGKAYTNYFGRCNVAEHEKLILLAQLKPEKDSDEAVTYSLGKFGQRALDFYSIHVTKESTHPVKPLAQIAGNRYASGPVGKALSQACMGTIASFLSKYQDIIIEHQKVVKGNQKRLESLRELAGKENLEYPSVTLPPQPHTKEGVDAYNEVIARVRMWVNLNLWQKLKLSRDDAKPLLRLKGFPSFPLVERQANEVDWWDMVCNVKKLINEKKEDGKVFWQNLAGYKRQEALRPYLSSEEDRKKGKKFARYQLGDLLLHLEKKHGEDWGKVYDEAWERIDKKVEGLSKHIKLEEERRSEDAQSKAALTDWLRAKASFVIEGLKEADKDEFCRCELKLQKWYGDLRGKPFAIEAENSILDISGFSKQYNCAFIWQKDGVKKLNLYLIINYFKGGKLRFKKIKPEAFEANRFYTVINKKSGEIVPMEVNFNFDDPNLIILPLAFGKRQGREFIWNDLLSLETGSLKLANGRVIEKTLYNRRTRQDEPALFVALTFERREVLDSSNIKPMNLIGVDRGENIPAVIALTDPEGCPLSRFKDSLGNPTHILRIGESYKEKQRTIQAKKEVEQRRAGGYSRKYASKAKNLADDMVRNTARDLLYYAVTQDAMLIFENLSRGFGRQGKRTFMAERQYTRMEDWLTAKLAYEGLPSKTYLSKTLAQYTSKTCSNCGFTITSADYDRVLEKLKKTATGWMTTINGKELKVEGQITYYNRYKRQNVVKDLSVELDRLSEESVNNDISSWTKGRSGEALSLLKKRFSHRPVQEKFVCLNCGFETHADEQAALNIARSWLFLRSQEYKKYQTNKTTGNTDKRAFVETWQSFYRKKLKEVWKPAV

SEQ ID NO: 661 - protein, 978 aa, Artificial Sequence
  CasX Variant
QEIKRINKIRRRLVKDSNTKKAGKTGPMKTLLVRVMTPDLRERLENLRKKPENIPQPISNTSRANLNKLLTDYTEMKKAILHVYWEEFQKDPVGLMSRVAQPASKKIDQNKLKPEMDEKGNLTTAGFACSQCGQPLFVYKLEQVSEKGKAYTNYFGRCNVAEHEKLILLAQLKPEKDSDEAVTYSLGKFGQRALDFYSIHVTKESTHPVKPLAQIAGNRYASGPVGKALSSACMGTIASFLSKYQDIIIEHQKVVKGNQKRLESLRELAGKENLEYPSVTLPPQPHTKEGVDAYNEVIARVRMWVNLNLWQKLKLSRDDAKPLLRLKGFPSFPLVERQANEVDWWDMVCNVKKLINEKKEDGKVFWQNLAGYKRQEALRPYLSSEEDRKKGKKFARYQLGDLLLHLEKKHGEDWGKVYDEAWERIDKKVEGLSKHIKLEEERRSEDAQSKAALTDWLRAKASFVIEGLKEADKDEFCRCELKLQKWYGDLRGKPFAIEAENSILDISGFSKQYNCAFIWQKDGVKKLNLYLIINYFKGGKLRFKKIKPEAFEANRFYTVINKKSGEIVPMEVNFNFDDPNLIILPLAFGKRQGREFIWNDLLSLETGSLKLANGRVIEKTLYNRRTRQDEPALFVALTFERREVLDSSNIKPMNLIGVDRGENIPAVIALTDPEGCPLSRFKDSLGNPTHILRIGESYKEKQRTIQAKKEVEQRRAGGYSRKYASKAKNLADDMVRNTARDLLYYAVTQDAMLIFENLSRGFGRQGKRTFMAERQYTRMEDWLTAKLAYEGLPSKTYLSKTLAQYTSKTCSNCGFTITSADYDRVLEKLKKTATGWMTTINGKELKVEGQITYYNRYKRQNVVKDLSVELDRLSEESVNNDISSWTKGRSGEALSLLKKRFSHRPVQEKFVCLNCGFETHADEQAALNIARSWLFLRSQEYKKYQTNKTTGNTDKRAFVETWQSFYRKKLKEVWKPAV

SEQ ID NO: 662 - protein, 978 aa, Artificial Sequence
  CasX Variant
QEIKRINKIRRRLVKDSNTKKAGKTGPMKTLLVRVMTPDLRERLENLRKKPENIPQPISNTSRANLNKLLTDYTEMKKAILHVYWEEFQKDPVGLMSRVAQPASKKIDQNKLKPEMDEKGNLTTAGFACSQCGQPLFVYKLEQVSEKGKAYTNYFGRCNVAEHEKLILLAQLKPEKDSDEAVTYSLGKFGQRALDFYSIHVTKESTHPVKPLAQIAGNRYASGPVGKALSAACMGTIASFLSKYQDIIIEHQKVVKGNQKRLESLRELAGKENLEYPSVTLPPQPHTKEGVDAYNEVIARVRMWVNLNLWQKLKLSRDDAKPLLRLKGFPSFPLVERQANEVDWWDMVCNVKKLINEKKEDGKVFWQNLAGYKRQEALRPYLSSEEDRKKGKKFARYQLGDLLLHLEKKHGEDWGKVYDEAWERIDKKVEGLSKHIKLEEERRSEDAQSKAALTDWLRAKASFVIEGLKEADKDEFCRCELKLQKWYGDLRGKPFAIEAENSILDISGFSKQYNCAFIWQKDGVKKLNLYLIINYFKGGKLRFKKIKPEAFEANRFYTVINKKSGEIVPMEVNFNFDDPNLIILPLAFGKRQGREFIWNDLLSLETGSLKLANGRVIEKTLYNRRTRQDEPALFVALTFERREVLDSSNIKPMNLIGVDRGENIPAVIALTDPEGCPLSRFKDSLGNPTHILRIGESYKEKQRTIQAKKEVEQRRAGGYSRKYASKAKNLADDMVRNTARDLLYYAVTQDAMLIFENLSRGFGRQGKRTFMAERQYTRMEDWLTAKLAYEGLPSKTYLSKTLAQYTSKTCSNCGFTITSADYDRVLEKLKKTATGWMTTINGKELKVEGQITYYNRYKRQNVVKDLSVELDRLSEESVNNDISSWTKGRSGEALSLLKKRFSHRPVQEKFVCLNCGFETHADEQAALNIARSWLFLRSQEYKKYQTNKTTGNTDKRAFVETWQSFYRKKLKEVWKPAV

SEQ ID NO: 663 - protein, 978 aa, Artificial Sequence
  CasX Variant
QEIKRINKIRRRLVKDSNTKKAGKTGPMKTLLVRVMTPDLRERLENLRKKPENIPQPISNTSRANLNKLLTDYTEMKKAILHVYWEEFQKDPVGLMSRVAQPASKKIDQNKLKPEMDEKGNLTTAGFACSQCGQPLFVYKLEQVSEKGKAYTNYFGRCNVAEHEKLILLAQLKPEKDSDEAVTYSLGKFGQRALDFYSIHVTKESTHPVKPLAQIAGNRYASGPVGKALSGACMGTIASFLSKYQDIIIEHQKVVKGNQKRLESLRELAGKENLEYPSVTLPPQPHTKEGVDAYNEVIARVRMWVNLNLWQKLKLSRDDAKPLLRLKGFPSFPLVERQANEVDWWDMVCNVKKLINEKKEDGKVFWQNLAGYKRQEALRPYLSSEEDRKKGKKFARYQLGDLLLHLEKKHGEDWGKVYDEAWERIDKKVEGLSKHIKLEEERRSEDAQSKAALTDWLRAKASFVIEGLKEADKDEFCRCELKLQKWYGDLRGKPFAIEAENSILDISGFSKQYNCAFIWQKDGVKKLNLYLIINYFKGGKLRFKKIKPEAFEANRFYTVINKKSGEIVPMEVNFNFDDPNLIILPLAFGKRQGREFIWNDLLSLETGSLKLANGRVIEKTLYNRRTRQDEPALFVALTFERREVLDSSNIKPMNLIGVDRGENIPAVIALTDPEGCPLSRFKDSLGNPTHILRIGESYKEKQRTIQAKKEVEQRRAGGYSRKYASKAKNLADDMVRNTARDLLYYAVTQDAMLIFENLSRGFGRQGKRTFMAERQYTRMEDWLTAKLAYEGLPSKTYLSKTLAQYTSKTCSNCGFTITSADYDRVLEKLKKTATGWMTTINGKELKVEGQITYYNRYKRQNVVKDLSVELDRLSEESVNNDISSWTKGRSGEALSLLKKRFSHRPVQEKFVCLNCGFETHADEQAALNIARSWLFLRSQEYKKYQTNKTTGNTDKRAFVETWQSFYRKKLKEVWKPAV

SEQ ID NO: 664 - protein, 978 aa, Artificial Sequence
  CasX Variant
QEIKRINKIRRRLVKDSNTKKAGKTGPMKTLLVRVMTPDLRERLENLRKKPENIPQPISNTSRANLNKLLTDYTEMKKAILHVYWEEFQKDPVGLMSRVAQPASKKIDQNKLKPEMDEKGNLTTAGFACSQCGQPLFVYKLEQVSEKGKAYTNYFGRCNVAEHEKLILLAQLKPEKDSDEAVTYSLGKFGQRALDFYSIHVTKESTHPVKPLAQIAGNRYASGPVGKALSTACMGTIASFLSKYQDIIIEHQKVVKGNQKRLESLRELAGKENLEYPSVTLPPQPHTKEGVDAYNEVIARVRMWVNLNLWQKLKLSRDDAKPLLRLKGFPSFPLVERQANEVDWWDMVCNVKKLINEKKEDGKVFWQNLAGYKRQEALRPYLSSEEDRKKGKKFARYQLGDLLLHLEKKHGEDWGKVYDEAWERIDKKVEGLSKHIKLEEERRSEDAQSKAALTDWLRAKASFVIEGLKEADKDEFCRCELKLQKWYGDLRGKPFAIEAENSILDISGFSKQYNCAFIWQKDGVKKLNLYLIINYFKGGKLRFKKIKPEAFEANRFYTVINKKSGEIVPMEVNFNFDDPNLIILPLAFGKRQGREFIWNDLLSLETGSLKLANGRVIEKTLYNRRTRQDEPALFVALTFERREVLDSSNIKPMNLIGVDRGENIPAVIALTDPEGCPLSRFKDSLGNPTHILRIGESYKEKQRTIQAKKEVEQRRAGGYSRKYASKAKNLADDMVRNTARDLLYYAVTQDAMLIFENLSRGFGRQGKRTFMAERQYTRMEDWLTAKLAYEGLPSKTYLSKTLAQYTSKTCSNCGFTITSADYDRVLEKLKKTATGWMTTINGKELKVEGQITYYNRYKRQNVVKDLSVELDRLSEESVNNDISSWTKGRSGEALSLLKKRFSHRPVQEKFVCLNCGFETHADEQAALNIARSWLFLRSQEYKKYQTNKTTGNTDKRAFVETWQSFYRKKLKEVWKPAV

SEQ ID NO: 665 - protein, 978 aa, Artificial Sequence
  CasX Variant
QEIKRINKIRRRLVKDSNTKKAGKRGPMKTLLVRVMTPDLRERLENLRKKPENIPQPISNTSRANLNKLLTDYTEMKKAILHVYWEEFQKDPVGLMSRVAQPASKKIDQNKLKPEMDEKGNLTTAGFACSQCGQPLFVYKLEQVSEKGKAYTNYFGRCNVAEHEKLILLAQLKPEKDSDEAVTYSLGKFGQRALDFYSIHVTKESTHPVKPLAQIAGNRYASGPVGKALSDACMGTIASFLSKYQDIIIEHQKVVKGNQKRLESLRELAGKENLEYPSVTLPPQPHTKEGVDAYNEVIARVRMWVNLNLWQKLKLSRDDAKPLLRLKGFPSFPLVERQANEVDWWDMVCNVKKLINEKKEDGKVFWQNLAGYKRQEALRPYLSSEEDRKKGKKFARYQLGDLLLHLEKKHGEDWGKVYDEAWERIDKKVEGLSKHIKLEEERRSEDAQSKAALTDWLRAKASFVIEGLKEADKDEFCRCELKLQKWYGDLRGKPFAIEAENSILDISGFSKQYNCAFIWQKDGVKKLNLYLIINYFKGGKLRFKKIKPEAFEANRFYTVINKKSGEIVPMEVNFNFDDPNLIILPLAFGKRQGREFIWNDLLSLETGSLKLANGRVIEKTLYNRRTRQDEPALFVALTFERREVLDSSNIKPMNLIGVDRGENIPAVIALTDPEGCPLSRFKDSLGNPTHILRIGESYKEKQRTIQAKKEVEQRRAGGYSRKYASKAKNLADDMVRNTARDLLYYAVTQDAMLIFENLSRGFGRQGKRTFMAERQYTRMEDWLTAKLAYEGLPSKTYLSKTLAQYTSKTCSNCGFTITSADYDRVLEKLKKTATGWMTTINGKELKVEGQITYYNRYKRQNVVKDLSVELDRLSEESVNNDISSWTKGRSGEALSLLKKRFSHRPVQEKFVCLNCGFETHADEQAALNIARSWLFLRSQEYKKYQTNKTTGNTDKRAFVETWQSFYRKKLKEVWKPAV

SEQ ID NO: 666 - protein, 978 aa, Artificial Sequence
  CasX Variant
QEIKRINKIRRRLVKDSNTKKAGKTGPMKTLLVRVMTPDLRERLENLRKKPENIPQPISNTSRANLNKLLTDYTEMKKAILHVYWEEFQKDPVGLMSRVAQPASKKIDQNKLKPEMDEKGNLTTAGFACSQCGQPLFVYKLEQVSEKGKAYTNYFGRCNVAEHEKLILLAQLKPEKDSDEAVTYSLGKFGQRALDFYSIHVTKESTHPVKPLAQIAGNRYASGPVGKALSDACMGTIASFLSKYQDIIIEHQKVVKGNQKRLESLRELAGKENLEYPSVTLPPQPHTKEGVDAYNEVIARVRMWVNLNLWQKLKLSRDDAKPLLRLKGFPSFPLVERQANEVDWWDMVCNVKKLINEKKEDGKVFWQNLAGYKRQEALRPYLSSEEDRKKGKKFARYQLHDLLLHLEKKHGEDWGKVYDEAWERIDKKVEGLSKHIKLEEERRSEDAQSKAALTDWLRAKASFVIEGLKEADKDEFCRCELKLQKWYGDLRGKPFAIEAENSILDISGFSKQYNCAFIWQKDGVKKLNLYLIINYFKGGKLRFKKIKPEAFEANRFYTVINKKSGEIVPMEVNFNFDDPNLIILPLAFGKRQGREFIWNDLLSLETGSLKLANGRVIEKTLYNRRTRQDEPALFVALTFERREVLDSSNIKPMNLIGVDRGENIPAVIALTDPEGCPLSRFKDSLGNPTHILRIGESYKEKQRTIQAKKEVEQRRAGGYSRKYASKAKNLADDMVRNTARDLLYYAVTQDAMLIFENLSRGFGRQGKRTFMAERQYTRMEDWLTAKLAYEGLPSKTYLSKTLAQYTSKTCSNCGFTITSADYDRVLEKLKKTATGWMTTINGKELKVEGQITYYNRYKRQNVVKDLSVELDRLSEESVNNDISSWTKGRSGEALSLLKKRFSHRPVQEKFVCLNCGFETHADEQAALNIARSWLFLRSQEYKKYQTNKTTGNTDKRAFVETWQSFYRKKLKEVWKPAV

SEQ ID NO: 667 - protein, 979 aa, Artificial Sequence
  CasX Variant
QEIKRINKIRRRLVKDSNTKKAGKTGPMKTLLVRVMTPDLRERLENLRKKPENIPQPISNTSRANLNKLLTDYTEMKKAILHVYWEEFQKDPVGLMSRVAQPASKKIDQNKLKPEMDEKEGNLTTAGFACSQCGQPLFVYKLEQVSEKGKAYTNYFGRCNVAEHEKLILLAQLKPEKDSDEAVTYSLGKFGQRALDFYSIHVTKESTHPVKPLAQIAGNRYASGPVGKALSDACMGTIASFLSKYQDIIIEHQKVVKGNQKRLESLRELAGKENLEYPSVTLPPQPHTKEGVDAYNEVIARVRMWVNLNLWQKLKLSRDDAKPLLRLKGFPSFPLVERQANEVDWWDMVCNVKKLINEKKEDGKVFWQNLAGYKRQEALRPYLSSEEDRKKGKKFARYQLGDLLLHLEKKHGEDWGKVYDEAWERIDKKVEGLSKHIKLEEERRSEDAQSKAALTDWLRAKASFVIEGLKEADKDEFCRCELKLQKWYGDLRGKPFAIEAENSILDISGFSKQYNCAFIWQKDGVKKLNLYLIINYFKGGKLRFKKIKPEAFEANRFYTVINKKSGEIVPMEVNFNFDDPNLIILPLAFGKRQGREFIWNDLLSLETGSLKLANGRVIEKTLYNRRTRQDEPALFVALTFERREVLDSSNIKPMNLIGVDRGENIPAVIALTDPEGCPLSRFKDSLGNPTHILRIGESYKEKQRTIQAKKEVEQRRAGGYSRKYASKAKNLADDMVRNTARDLLYYAVTQDAMLIFENLSRGFGRQGKRTFMAERQYTRMEDWLTAKLAYEGLPSKTYLSKTLAQYTSKTCSNCGFTITSADYDRVLEKLKKTATGWMTTINGKELKVEGQITYYNRYKRQNVVKDLSVELDRLSEESVNNDISSWTKGRSGEALSLLKKRFSHRPVQEKFVCLNCGFETHADEQAALNIARSWLFLRSQEYKKYQTNKTTGNTDKRAFVETWQSFYRKKLKEVWKPAV

SEQ ID NO: 668 - protein, 978 aa, Artificial Sequence
  CasX Variant
QEIKRINKIRRRLVKDSNTKKAGKTGPMKTLLVRVMTPDLRERLENLRKKPENIPQPISNTSRANLNKLLTDYTEMKKAILHVYWEEFQKDPVGLMSRVAQPASKKIDQNKLKPEMDEKGNLTTAGFACSQCGQPLFVYKLEQVSEKGKAYTNYFGRCNVAEHEKLILLAQLKPEKDSDEAVTYSLGKFGQRALDFYSIHVTKESTHPVKPLAQIAGNRYASGPVGKALSDACMGTIASFLSKYQDIIIEHQKVVKGNQKRLESLRELAGKENLEYPSVTLPPQPHTKEGVDAYNEVIARVRMWVNINLWQKLKLSRDDAKPLLRLKGFPSFPLVERQANEVDWWDMVCNVKKLINEKKEDGKVFWQNLAGYKRQEALRPYLSSEEDRKKGKKFARYQLGDLLLHLEKKHGEDWGKVYDEAWERIDKKVEGLSKHIKLEEERRSEDAQSKAALTDWLRAKASFVIEGLKEADKDEFCRCELKLQKWYGDLRGKPFAIEAENSILDISGFSKQYNCAFIWQKDGVKKLNLYLIINYFKGGKLRFKKIKPEAFEANRFYTVINKKSGEIVPMEVNFNFDDPNLIILPLAFGKRQGREFIWNDLLSLETGSLKLANGRVIEKTLYNRRTRQDEPALFVALTFERREVLDSSNIKPMNLIGVDRGENIPAVIALTDPEGCPLSRFKDSLGNPTHILRIGESYKEKQRTIQAKKEVEQRRAGGYSRKYASKAKNLADDMVRNTARDLLYYAVTQDAMLIFENLSRGFGRQGKRTFMAERQYTRMEDWLTAKLAYEGLPSKTYLSKTLAQYTSKTCSNCGFTITSADYDRVLEKLKKTATGWMTTINGKELKVEGQITYYNRYKRQNVVKDLSVELDRLSEESVNNDISSWTKGRSGEALSLLKKRFSHRPVQEKFVCLNCGFETHADEQAALNIARSWLFLRSQEYKKYQTNKTTGNTDKRAFVETWQSFYRKKLKEVWKPAV

SEQ ID NO: 669 - protein, 979 aa, Artificial Sequence
  CasX Variant
QEIKRINKIRRRLVKDSNTKKAGKTGPMKTLLVRVMTPDLRERLENLRKKPENIPQPISNTSRANLNKLLTDYTEMKKAILHVYWEEFQKDPVGLMSRVAQPASKKIDQNKLKPEMDEKGNLTTAGFACSQCGQPLFVYKLEQVSEKGKAYTNYFGRCNVAEHEKLILLAQLKPEKDSDEAVTYSLGKFGQRALDFYSIHVTKESTHPVKPLAQIAGNRYASGPVGKALSDACMGTIASFLSKYQDIIIEHQKVVKGNQKRLESLRELAGKENLEYPSVTLPPQPHTKEGVDAYNEVIARVRMWVNLNLWQKLKLSRDDAKPLLRLKGFPSFPLVERQANEVDWWDMVCNVKKLINEKKEDGKVFWQNLAGYKRQEALRPYLFSSEEDRKKGKKFARYQLGDLLLHLEKKHGEDWGKVYDEAWERIDKKVEGLSKHIKLEEERRSEDAQSKAALTDWLRAKASFVIEGLKEADKDEFCRCELKLQKWYGDLRGKPFAIEAENSILDISGFSKQYNCAFIWQKDGVKKLNLYLIINYFKGGKLRFKKIKPEAFEANRFYTVINKKSGEIVPMEVNFNFDDPNLIILPLAFGKRQGREFIWNDLLSLETGSLKLANGRVIEKTLYNRRTRQDEPALFVALTFERREVLDSSNIKPMNLIGVDRGENIPAVIALTDPEGCPLSRFKDSLGNPTHILRIGESYKEKQRTIQAKKEVEQRRAGGYSRKYASKAKNLADDMVRNTARDLLYYAVTQDAMLIFENLSRGFGRQGKRTFMAERQYTRMEDWLTAKLAYEGLPSKTYLSKTLAQYTSKTCSNCGFTITSADYDRVLEKLKKTATGWMTTINGKELKVEGQITYYNRYKRQNVVKDLSVELDRLSEESVNNDISSWTKGRSGEALSLLKKRFSHRPVQEKFVCLNCGFETHADEQAALNIARSWLFLRSQEYKKYQTNKTTGNTDKRAFVETWQSFYRKKLKEVWKPAV

SEQ ID NO: 670 - protein, 979 aa, Artificial Sequence
  CasX Variant
QEIKRINKIRRRLVKDSNTKKAGKTGPMKTLLVRVMTPDLRERLENLRKKPENIPQPISNTSRANLNKLLTDYTEMKKAILHVYWEEFQKDPVGLMSRVAQPASKKIDQNKLKPEMDEKGNLTTAGFACSQCGQPLFVYKWLEQVSEKGKAYTNYFGRCNVAEHEKLILLAQLKPEKDSDEAVTYSLGKFGQRALDFYSIHVTKESTHPVKPLAQIAGNRYASGPVGKALSDACMGTIASFLSKYQDIIIEHQKVVKGNQKRLESLRELAGKENLEYPSVTLPPQPHTKEGVDAYNEVIARVRMWVNLNLWQKLKLSRDDAKPLLRLKGFPSFPLVERQANEVDWWDMVCNVKKLINEKKEDGKVFWQNLAGYKRQEALRPYLSSEEDRKKGKKFARYQLGDLLLHLEKKHGEDWGKVYDEAWERIDKKVEGLSKHIKLEEERRSEDAQSKAALTDWLRAKASFVIEGLKEADKDEFCRCELKLQKWYGDLRGKPFAIEAENSILDISGFSKQYNCAFIWQKDGVKKLNLYLIINYFKGGKLRFKKIKPEAFEANRFYTVINKKSGEIVPMEVNFNFDDPNLIILPLAFGKRQGREFIWNDLLSLETGSLKLANGRVIEKTLYNRRTRQDEPALFVALTFERREVLDSSNIKPMNLIGVDRGENIPAVIALTDPEGCPLSRFKDSLGNPTHILRIGESYKEKQRTIQAKKEVEQRRAGGYSRKYASKAKNLADDMVRNTARDLLYYAVTQDAMLIFENLSRGFGRQGKRTFMAERQYTRMEDWLTAKLAYEGLPSKTYLSKTLAQYTSKTCSNCGFTITSADYDRVLEKLKKTATGWMTTINGKELKVEGQITYYNRYKRQNVVKDLSVELDRLSEESVNNDISSWTKGRSGEALSLLKKRFSHRPVQEKFVCLNCGFETHADEQAALNIARSWLFLRSQEYKKYQTNKTTGNTDKRAFVETWQSFYRKKLKEVWKPAV

SEQ ID NO: 671 - protein, 978 aa, Artificial Sequence
  CasX Variant
QEIKRINKIRRRLVKDSNTKKAGKTGPMKTLLVRVMTPDLRERLENLRKKPENIPQPISNTSRANLNKLLTDYTEMKKAILHVYWEEFQKDPVGLMSRVAQPASKKIDQNKLKPEMDEKGNLTTAGFACSQCGQPLFVYKLEQVSEKGKAYTNYFGRCNVAEHEKLILLAQLKPEKDSDEAVTYSLGKFGQRALDFYSIHVTKESTHPVKPLAQIAGNRYASGPVGKALSDACMGTIASFLSKYQDIIIEHQKVVKGNQKRLESLRELAGKENLEYPSVTLPPQPHTKEGVDAYNEVIARVRMWVNDNLWQKLKLSRDDAKPLLRLKGFPSFPLVERQANEVDWWDMVCNVKKLINEKKEDGKVFWQNLAGYKRQEALRPYLSSEEDRKKGKKFARYQLGDLLLHLEKKHGEDWGKVYDEAWERIDKKVEGLSKHIKLEEERRSEDAQSKAALTDWLRAKASFVIEGLKEADKDEFCRCELKLQKWYGDLRGKPFAIEAENSILDISGFSKQYNCAFIWQKDGVKKLNLYLIINYFKGGKLRFKKIKPEAFEANRFYTVINKKSGEIVPMEVNFNFDDPNLIILPLAFGKRQGREFIWNDLLSLETGSLKLANGRVIEKTLYNRRTRQDEPALFVALTFERREVLDSSNIKPMNLIGVDRGENIPAVIALTDPEGCPLSRFKDSLGNPTHILRIGESYKEKQRTIQAKKEVEQRRAGGYSRKYASKAKNLADDMVRNTARDLLYYAVTQDAMLIFENLSRGFGRQGKRTFMAERQYTRMEDWLTAKLAYEGLPSKTYLSKTLAQYTSKTCSNCGFTITSADYDRVLEKLKKTATGWMTTINGKELKVEGQITYYNRYKRQNVVKDLSVELDRLSEESVNNDISSWTKGRSGEALSLLKKRFSHRPVQEKFVCLNCGFETHADEQAALNIARSWLFLRSQEYKKYQTNKTTGNTDKRAFVETWQSFYRKKLKEVWKPAV

SEQ ID NO: 672 - protein, 978 aa, Artificial Sequence
  CasX Variant
QEIKRINKIRRRLVKDSNTKKAGKTGPMKTLLVRVMTPDLRERLENLRKKPENIPQPISNTSRANLNKLLTDYTEMKKAILHVYWEEFQKDPVGLMSRVAQPASKKIDQNKLKPEMDEKGNLTTAGFACSQCGQPLFVYKLEQVSEKGKAYTNYFGRCNVAEHEKLILLAQLKPEKDSDEAVTYSLGKFGQRALDFYSIHVTKESTHPVKPLAQIAGNRYASGPVGKALSDACMGTIASFLSKYQDIIIEHQKVVKGNQKRLESLRELAGKENLEYPSVTLPPQPHTKEGVDAYNEVIARVRMWVNLNLWQKLKLSRDDAKPLLRLKGFPSFPLVERQANEVDWWDMVCNVKKLINEKKEDGKVFWQNLAGYKRQEALRPYLSSEEDRKKGKKFARYQLGDLLLHLEKKHGEDWGKVYDEAWERIDKKVEGLSKHIKLEEERRSEDAQSKAALTDWLRAKASFVIEGLKEADKDEFCRCELKLQKWYGDLRGKPFAIEAENSILDISGFSTQYNCAFIWQKDGVKKLNLYLIINYFKGGKLRFKKIKPEAFEANRFYTVINKKSGEIVPMEVNFNFDDPNLIILPLAFGKRQGREFIWNDLLSLETGSLKLANGRVIEKTLYNRRTRQDEPALFVALTFERREVLDSSNIKPMNLIGVDRGENIPAVIALTDPEGCPLSRFKDSLGNPTHILRIGESYKEKQRTIQAKKEVEQRRAGGYSRKYASKAKNLADDMVRNTARDLLYYAVTQDAMLIFENLSRGFGRQGKRTFMAERQYTRMEDWLTAKLAYEGLPSKTYLSKTLAQYTSKTCSNCGFTITSADYDRVLEKLKKTATGWMTTINGKELKVEGQITYYNRYKRQNVVKDLSVELDRLSEESVNNDISSWTKGRSGEALSLLKKRFSHRPVQEKFVCLNCGFETHADEQAALNIARSWLFLRSQEYKKYQTNKTTGNTDKRAFVETWQSFYRKKLKEVWKPAV

SEQ ID NO: 673 - protein, 978 aa, Artificial Sequence
  CasX Variant
QEIKRINKIRRRLVKDSNTKKAGKTGPMKTLLVRVMTPDLRERLENLRKKPENIPQPISNTSRANLNKLLTDYTEMKKAILHVYWEEFQKDPVGLMSRVAQPASKKIDQNKLKPEMDEKGNLTTAGFACSQCGQPLFVYKLEQVSEKGKAYTNYFGRCNVAEHEKLILLDQLKPEKDSDEAVTYSLGKFGQRALDFYSIHVTKESTHPVKPLAQIAGNRYASGPVGKALSDACMGTIASFLSKYQDIIIEHQKVVKGNQKRLESLRELAGKENLEYPSVTLPPQPHTKEGVDAYNEVIARVRMWVNLNLWQKLKLSRDDAKPLLRLKGFPSFPLVERQANEVDWWDMVCNVKKLINEKKEDGKVFWQNLAGYKRQEALRPYLSSEEDRKKGKKFARYQLGDLLLHLEKKHGEDWGKVYDEAWERIDKKVEGLSKHIKLEEERRSEDAQSKAALTDWLRAKASFVIEGLKEADKDEFCRCELKLQKWYGDLRGKPFAIEAENSILDISGFSKQYNCAFIWQKDGVKKLNLYLIINYFKGGKLRFKKIKPEAFEANRFYTVINKKSGEIVPMEVNFNFDDPNLIILPLAFGKRQGREFIWNDLLSLETGSLKLANGRVIEKTLYNRRTRQDEPALFVALTFERREVLDSSNIKPMNLIGVDRGENIPAVIALTDPEGCPLSRFKDSLGNPTHILRIGESYKEKQRTIQAKKEVEQRRAGGYSRKYASKAKNLADDMVRNTARDLLYYAVTQDAMLIFENLSRGFGRQGKRTFMAERQYTRMEDWLTAKLAYEGLPSKTYLSKTLAQYTSKTCSNCGFTITSADYDRVLEKLKKTATGWMTTINGKELKVEGQITYYNRYKRQNVVKDLSVELDRLSEESVNNDISSWTKGRSGEALSLLKKRFSHRPVQEKFVCLNCGFETHADEQAALNIARSWLFLRSQEYKKYQTNKTTGNTDKRAFVETWQSFYRKKLKEVWKPAV

SEQ ID NO: 674 - protein, 978 aa, Artificial Sequence
  CasX Variant
QEIKRINKIRRRLVKDSNTKKAGKTGPMKTLLVRVMTPDLRERLENLRKKPENIPQPISNTSRANLNKLLTDYTEMKKAILHVYWEEFQKDPVGLMSRVAQPASKKIDQNKLKPEMDEKGNLTTAGFACSQCGQPLFVYKLEQVSEKGKAYTNYFGRCNVAEHEKLIPLAQLKPEKDSDEAVTYSLGKFGQRALDFYSIHVTKESTHPVKPLAQIAGNRYASGPVGKALSDACMGTIASFLSKYQDIIIEHQKVVKGNQKRLESLRELAGKENLEYPSVTLPPQPHTKEGVDAYNEVIARVRMWVNLNLWQKLKLSRDDAKPLLRLKGFPSFPLVERQANEVDWWDMVCNVKKLINEKKEDGKVFWQNLAGYKRQEALRPYLSSEEDRKKGKKFARYQLGDLLLHLEKKHGEDWGKVYDEAWERIDKKVEGLSKHIKLEEERRSEDAQSKAALTDWLRAKASFVIEGLKEADKDEFCRCELKLQKWYGDLRGKPFAIEAENSILDISGFSKQYNCAFIWQKDGVKKLNLYLIINYFKGGKLRFKKIKPEAFEANRFYTVINKKSGEIVPMEVNFNFDDPNLIILPLAFGKRQGREFIWNDLLSLETGSLKLANGRVIEKTLYNRRTRQDEPALFVALTFERREVLDSSNIKPMNLIGVDRGENIPAVIALTDPEGCPLSRFKDSLGNPTHILRIGESYKEKQRTIQAKKEVEQRRAGGYSRKYASKAKNLADDMVRNTARDLLYYAVTQDAMLIFENLSRGFGRQGKRTFMAERQYTRMEDWLTAKLAYEGLPSKTYLSKTLAQYTSKTCSNCGFTITSADYDRVLEKLKKTATGWMTTINGKELKVEGQITYYNRYKRQNVVKDLSVELDRLSEESVNNDISSWTKGRSGEALSLLKKRFSHRPVQEKFVCLNCGFETHADEQAALNIARSWLFLRSQEYKKYQTNKTTGNTDKRAFVETWQSFYRKKLKEVWKPAV

SEQ ID NO: 675 - protein, 978 aa, Artificial Sequence
  CasX Variant
QEIKRINKIRRRLVKDSNTKKAGKTGPMKTLLVRVMTPDLRERLENLRKKPENIPQPISNTSRANLNKLLTDYTEMKKAILHVYWEEFQKDPVGLMSRVAQPASKKIDQNKLKPEMDEKGNLTTAGFACSQCGQPLFVYKLEQVSEKGKAYTNYFGRCNVAEHEKLILLAQLKPEKDSDEAVTYSLGKFGQRALDFYSIHVTKESTHPVKPLAQIAGNRYASGPVGKALSDACMGTIASFLSKYQDIIIEHQKVVKGNQKRLESLRELAGKENLEYPSVTLPPQPHTKEGVDAYNEVIARVRMWVNLNLWQKLKLSRDDAKPLLRLKGFPSFPLVERQANEVDWWDMVCNVKKLINEKKEDGKVFWQNLAGYKRQEALRPYLSSEEDRKKGKKFARYQLGDLLLHLEKKHGEDWGKVYDEAWERIDKKVEGLSKHIKLEEERRSEDAQSKAALTDWLRAKASFVIEGLKEADKDEFCRCELKLQKWYGDLRGKPFAIEAENSILDISGFSKQYNCAFIWQKDGVKKLNLYLIINYFKGGKLRFKKIKPEAFEANRFYTVINKKSGEIVPMEVNFNFDDPNLIILPLAFGKRQGREFIWNDLLSLETGSLKLANGRVIEKTLYNRRTRQDEPALFVALTFERREVLDSSNIKPMNLIGVDRGENIPAVIALTDPEGCPLSRFKDSLGNPTHILRIGESYKEKQRTIQAKKEVEQRRAGGYSRKYASKAKNLADDMVRNTARDLLYYAVTQDAMLIFENLSRGFGRQGKRTFMAERQYTRMEDWLTAKKAYEGLPSKTYLSKTLAQYTSKTCSNCGFTITSADYDRVLEKLKKTATGWMTTINGKELKVEGQITYYNRYKRQNVVKDLSVELDRLSEESVNNDISSWTKGRSGEALSLLKKRFSHRPVQEKFVCLNCGFETHADEQAALNIARSWLFLRSQEYKKYQTNKTTGNTDKRAFVETWQSFYRKKLKEVWKPAV

SEQ ID NO: 676 - protein, 978 aa, Artificial Sequence
  CasX Variant
QEIKRINKIRRRLVKDSNTKKAGKTGPMKTLLVRVMTPDLRERLENLRKKPENIPQPISNTSRANLNKLLTDYTEMKKAILHVYWEEFQKDPVGLMSRVAQPASKKIDQNKLKPEMDEKGNLTTAGFACSQCGQPLFVYKLEQVSEKGKAYTNYFGRCNVAEHEKLILLAQLKPEKDSDEAVTYSLGKFGQRALDFYSIHVTKESTHPVKPLAQIAGNRYASGPVGKALSDACMGTIASFLSKYQDIIIEHQKVVKGNQKRLESLRELAGKENLEYPSVTLPPQPHTKEGVDAYNEVIARVRMWVNLNLWQKLKLSRDDAKPLLRLKGFPSFPLVERQANEVDWWDMVCNVKKLINEKKEDGKVFWQNLAGYKRQEALRPYLSSEEDRKKGKKFARYQLGDLLLHLEKKHGEDWGKVYDEAWERIDKKVEGLSKHIKLEEERRSEDAQSKAALTDWLRAKASFVIEGLKEADKDEFCRCELKLQKWYGDLRGKPFAIEAENSILDISGFSKQYNCAFIWQKDGVKKLNLYLIINYFKGGKLRFKKIKPEAFEANRFYTVINKKSGEIVPMEVNFNFDDPNLIILPLAFGKRQGREFIWNDLLSLETGSLKLANGRVIEKTLYNRRTRQDEPALFVALTFERREVLDSSNIKPMNLIGVDRGENIPAVIALTDPEGCPLSRFKDSLGNPTHILRIGESYKEKQRTIQAKKEVEQRRAGGYSRKYASKAKNLADDMVRNTARDLLYYAVTQDAMLIFENLSRGFGRQGKRTFMAERQYTRMEDWLTAKLKYEGLPSKTYLSKTLAQYTSKTCSNCGFTITSADYDRVLEKLKKTATGWMTTINGKELKVEGQITYYNRYKRQNVVKDLSVELDRLSEESVNNDISSWTKGRSGEALSLLKKRFSHRPVQEKFVCLNCGFETHADEQAALNIARSWLFLRSQEYKKYQTNKTTGNTDKRAFVETWQSFYRKKLKEVWKPAV

SEQ ID NO: 677 - protein, 978 aa, Artificial Sequence
  CasX Variant
QEGKRINKIRRRLVKDSNTKKAGKTGPMKTLLVRVMTPDLRERLENLRKKPENIPQPISNTSRANLNKLLTDYTEMKKAILHVYWEEFQKDPVGLMSRVAQPASKKIDQNKLKPEMDEKGNLTTAGFACSQCGQPLFVYKLEQVSEKGKAYTNYFGRCNVAEHEKLILLAQLKPEKDSDEAVTYSLGKFGQRALDFYSIHVTKESTHPVKPLAQIAGNRYASGPVGKALSDACMGTIASFLSKYQDIIIEHQKVVKGNQKRLESLRELAGKENLEYPSVTLPPQPHTKEGVDAYNEVIARVRMWVNLNLWQKLKLSRDDAKPLLRLKGFPSFPLVERQANEVDWWDMVCNVKKLINEKKEDGKVFWQNLAGYKRQEALRPYLSSEEDRKKGKKFARYQLGDLLLHLEKKHGEDWGKVYDEAWERIDKKVEGLSKHIKLEEERRSEDAQSKAALTDWLRAKASFVIEGLKEADKDEFCRCELKLQKWYGDLRGKPFAIEAENSILDISGFSKQYNCAFIWQKDGVKKLNLYLIINYFKGGKLRFKKIKPEAFEANRFYTVINKKSGEIVPMEVNFNFDDPNLIILPLAFGKRQGREFIWNDLLSLETGSLKLANGRVIEKTLYNRRTRQDEPALFVALTFERREVLDSSNIKPMNLIGVDRGENIPAVIALTDPEGCPLSRFKDSLGNPTHILRIGESYKEKQRTIQAKKEVEQRRAGGYSRKYASKAKNLADDMVRNTARDLLYYAVTQDAMLIFENLSRGFGRQGKRTFMAERQYTRMEDWLTAKLAYEGLPSKTYLSKTLAQYTSKTCSNCGFTITSADYDRVLEKLKKTATGWMTTINGKELKVEGQITYYNRYKRQNVVKDLSVELDRLSEESVNNDISSWTKGRSGEALSLLKKRFSHRPVQEKFVCLNCGFETHADEQAALNIARSWLFLRSQEYKKYQTNKTTGNTDKRAFVETWQSFYRKKLKEVWKPAV

SEQ ID NO: 678 - protein, 978 aa, Artificial Sequence
  CasX Variant
QEEKRINKIRRRLVKDSNTKKAGKTGPMKTLLVRVMTPDLRERLENLRKKPENIPQPISNTSRANLNKLLTDYTEMKKAILHVYWEEFQKDPVGLMSRVAQPASKKIDQNKLKPEMDEKGNLTTAGFACSQCGQPLFVYKLEQVSEKGKAYTNYFGRCNVAEHEKLILLAQLKPEKDSDEAVTYSLGKFGQRALDFYSIHVTKESTHPVKPLAQIAGNRYASGPVGKALSDACMGTIASFLSKYQDIIIEHQKVVKGNQKRLESLRELAGKENLEYPSVTLPPQPHTKEGVDAYNEVIARVRMWVNLNLWQKLKLSRDDAKPLLRLKGFPSFPLVERQANEVDWWDMVCNVKKLINEKKEDGKVFWQNLAGYKRQEALRPYLSSEEDRKKGKKFARYQLGDLLLHLEKKHGEDWGKVYDEAWERIDKKVEGLSKHIKLEEERRSEDAQSKAALTDWLRAKASFVIEGLKEADKDEFCRCELKLQKWYGDLRGKPFAIEAENSILDISGFSKQYNCAFIWQKDGVKKLNLYLIINYFKGGKLRFKKIKPEAFEANRFYTVINKKSGEIVPMEVNFNFDDPNLIILPLAFGKRQGREFIWNDLLSLETGSLKLANGRVIEKTLYNRRTRQDEPALFVALTFERREVLDSSNIKPMNLIGVDRGENIPAVIALTDPEGCPLSRFKDSLGNPTHILRIGESYKEKQRTIQAKKEVEQRRAGGYSRKYASKAKNLADDMVRNTARDLLYYAVTQDAMLIFENLSRGFGRQGKRTFMAERQYTRMEDWLTAKLAYEGLPSKTYLSKTLAQYTSKTCSNCGFTITSADYDRVLEKLKKTATGWMTTINGKELKVEGQITYYNRYKRQNVVKDLSVELDRLSEESVNNDISSWTKGRSGEALSLLKKRFSHRPVQEKFVCLNCGFETHADEQAALNIARSWLFLRSQEYKKYQTNKTTGNTDKRAFVETWQSFYRKKLKEVWKPAV

SEQ ID NO: 679 - protein, 979 aa, Artificial Sequence
  CasX Variant
QEIGKRINKIRRRLVKDSNTKKAGKTGPMKTLLVRVMTPDLRERLENLRKKPENIPQPISNTSRANLNKLLTDYTEMKKAILHVYWEEFQKDPVGLMSRVAQPASKKIDQNKLKPEMDEKGNLTTAGFACSQCGQPLFVYKLEQVSEKGKAYTNYFGRCNVAEHEKLILLAQLKPEKDSDEAVTYSLGKFGQRALDFYSIHVTKESTHPVKPLAQIAGNRYASGPVGKALSDACMGTIASFLSKYQDIIIEHQKVVKGNQKRLESLRELAGKENLEYPSVTLPPQPHTKEGVDAYNEVIARVRMWVNLNLWQKLKLSRDDAKPLLRLKGFPSFPLVERQANEVDWWDMVCNVKKLINEKKEDGKVFWQNLAGYKRQEALRPYLSSEEDRKKGKKFARYQLGDLLLHLEKKHGEDWGKVYDEAWERIDKKVEGLSKHIKLEEERRSEDAQSKAALTDWLRAKASFVIEGLKEADKDEFCRCELKLQKWYGDLRGKPFAIEAENSILDISGFSKQYNCAFIWQKDGVKKLNLYLIINYFKGGKLRFKKIKPEAFEANRFYTVINKKSGEIVPMEVNFNFDDPNLIILPLAFGKRQGREFIWNDLLSLETGSLKLANGRVIEKTLYNRRTRQDEPALFVALTFERREVLDSSNIKPMNLIGVDRGENIPAVIALTDPEGCPLSRFKDSLGNPTHILRIGESYKEKQRTIQAKKEVEQRRAGGYSRKYASKAKNLADDMVRNTARDLLYYAVTQDAMLIFENLSRGFGRQGKRTFMAERQYTRMEDWLTAKLAYEGLPSKTYLSKTLAQYTSKTCSNCGFTITSADYDRVLEKLKKTATGWMTTINGKELKVEGQITYYNRYKRQNVVKDLSVELDRLSEESVNNDISSWTKGRSGEALSLLKKRFSHRPVQEKFVCLNCGFETHADEQAALNIARSWLFLRSQEYKKYQTNKTTGNTDKRAFVETWQSFYRKKLKEVWKPAV

SEQ ID NO: 680 - protein, 978 aa, Artificial Sequence
  CasX Variant
QEIGRINKIRRRLVKDSNTKKAGKTGPMKTLLVRVMTPDLRERLENLRKKPENIPQPISNTSRANLNKLLTDYTEMKKAILHVYWEEFQKDPVGLMSRVAQPASKKIDQNKLKPEMDEKGNLTTAGFACSQCGQPLFVYKLEQVSEKGKAYTNYFGRCNVAEHEKLILLAQLKPEKDSDEAVTYSLGKFGQRALDFYSIHVTKESTHPVKPLAQIAGNRYASGPVGKALSDACMGTIASFLSKYQDIIIEHQKVVKGNQKRLESLRELAGKENLEYPSVTLPPQPHTKEGVDAYNEVIARVRMWVNLNLWQKLKLSRDDAKPLLRLKGFPSFPLVERQANEVDWWDMVCNVKKLINEKKEDGKVFWQNLAGYKRQEALRPYLSSEEDRKKGKKFARYQLGDLLLHLEKKHGEDWGKVYDEAWERIDKKVEGLSKHIKLEEERRSEDAQSKAALTDWLRAKASFVIEGLKEADKDEFCRCELKLQKWYGDLRGKPFAIEAENSILDISGFSKQYNCAFIWQKDGVKKLNLYLIINYFKGGKLRFKKIKPEAFEANRFYTVINKKSGEIVPMEVNFNFDDPNLIILPLAFGKRQGREFIWNDLLSLETGSLKLANGRVIEKTLYNRRTRQDEPALFVALTFERREVLDSSNIKPMNLIGVDRGENIPAVIALTDPEGCPLSRFKDSLGNPTHILRIGESYKEKQRTIQAKKEVEQRRAGGYSRKYASKAKNLADDMVRNTARDLLYYAVTQDAMLIFENLSRGFGRQGKRTFMAERQYTRMEDWLTAKLAYEGLPSKTYLSKTLAQYTSKTCSNCGFTITSADYDRVLEKLKKTATGWMTTINGKELKVEGQITYYNRYKRQNVVKDLSVELDRLSEESVNNDISSWTKGRSGEALSLLKKRFSHRPVQEKFVCLNCGFETHADEQAALNIARSWLFLRSQEYKKYQTNKTTGNTDKRAFVETWQSFYRKKLKEVWKPAV

SEQ ID NO: 681 - protein, 978 aa, Artificial Sequence
  CasX Variant
QEISRINKIRRRLVKDSNTKKAGKTGPMKTLLVRVMTPDLRERLENLRKKPENIPQPISNTSRANLNKLLTDYTEMKKAILHVYWEEFQKDPVGLMSRVAQPASKKIDQNKLKPEMDEKGNLTTAGFACSQCGQPLFVYKLEQVSEKGKAYTNYFGRCNVAEHEKLILLAQLKPEKDSDEAVTYSLGKFGQRALDFYSIHVTKESTHPVKPLAQIAGNRYASGPVGKALSDACMGTIASFLSKYQDIIIEHQKVVKGNQKRLESLRELAGKENLEYPSVTLPPQPHTKEGVDAYNEVIARVRMWVNLNLWQKLKLSRDDAKPLLRLKGFPSFPLVERQANEVDWWDMVCNVKKLINEKKEDGKVFWQNLAGYKRQEALRPYLSSEEDRKKGKKFARYQLGDLLLHLEKKHGEDWGKVYDEAWERIDKKVEGLSKHIKLEEERRSEDAQSKAALTDWLRAKASFVIEGLKEADKDEFCRCELKLQKWYGDLRGKPFAIEAENSILDISGFSKQYNCAFIWQKDGVKKLNLYLIINYFKGGKLRFKKIKPEAFEANRFYTVINKKSGEIVPMEVNFNFDDPNLIILPLAFGKRQGREFIWNDLLSLETGSLKLANGRVIEKTLYNRRTRQDEPALFVALTFERREVLDSSNIKPMNLIGVDRGENIPAVIALTDPEGCPLSRFKDSLGNPTHILRIGESYKEKQRTIQAKKEVEQRRAGGYSRKYASKAKNLADDMVRNTARDLLYYAVTQDAMLIFENLSRGFGRQGKRTFMAERQYTRMEDWLTAKLAYEGLPSKTYLSKTLAQYTSKTCSNCGFTITSADYDRVLEKLKKTATGWMTTINGKELKVEGQITYYNRYKRQNVVKDLSVELDRLSEESVNNDISSWTKGRSGEALSLLKKRFSHRPVQEKFVCLNCGFETHADEQAALNIARSWLFLRSQEYKKYQTNKTTGNTDKRAFVETWQSFYRKKLKEVWKPAV

SEQ ID NO: 682 - protein, 979 aa, Artificial Sequence
  CasX Variant
QEIKGRINKIRRRLVKDSNTKKAGKTGPMKTLLVRVMTPDLRERLENLRKKPENIPQPISNTSRANLNKLLTDYTEMKKAILHVYWEEFQKDPVGLMSRVAQPASKKIDQNKLKPEMDEKGNLTTAGFACSQCGQPLFVYKLEQVSEKGKAYTNYFGRCNVAEHEKLILLAQLKPEKDSDEAVTYSLGKFGQRALDFYSIHVTKESTHPVKPLAQIAGNRYASGPVGKALSDACMGTIASFLSKYQDIIIEHQKVVKGNQKRLESLRELAGKENLEYPSVTLPPQPHTKEGVDAYNEVIARVRMWVNLNLWQKLKLSRDDAKPLLRLKGFPSFPLVERQANEVDWWDMVCNVKKLINEKKEDGKVFWQNLAGYKRQEALRPYLSSEEDRKKGKKFARYQLGDLLLHLEKKHGEDWGKVYDEAWERIDKKVEGLSKHIKLEEERRSEDAQSKAALTDWLRAKASFVIEGLKEADKDEFCRCELKLQKWYGDLRGKPFAIEAENSILDISGFSKQYNCAFIWQKDGVKKLNLYLIINYFKGGKLRFKKIKPEAFEANRFYTVINKKSGEIVPMEVNFNFDDPNLIILPLAFGKRQGREFIWNDLLSLETGSLKLANGRVIEKTLYNRRTRQDEPALFVALTFERREVLDSSNIKPMNLIGVDRGENIPAVIALTDPEGCPLSRFKDSLGNPTHILRIGESYKEKQRTIQAKKEVEQRRAGGYSRKYASKAKNLADDMVRNTARDLLYYAVTQDAMLIFENLSRGFGRQGKRTFMAERQYTRMEDWLTAKLAYEGLPSKTYLSKTLAQYTSKTCSNCGFTITSADYDRVLEKLKKTATGWMTTINGKELKVEGQITYYNRYKRQNVVKDLSVELDRLSEESVNNDISSWTKGRSGEALSLLKKRFSHRPVQEKFVCLNCGFETHADEQAALNIARSWLFLRSQEYKKYQTNKTTGNTDKRAFVETWQSFYRKKLKEVWKPAV

SEQ ID NO: 683 - protein, 978 aa, Artificial Sequence
  CasX Variant
QEIKSINKIRRRLVKDSNTKKAGKTGPMKTLLVRVMTPDLRERLENLRKKPENIPQPISNTSRANLNKLLTDYTEMKKAILHVYWEEFQKDPVGLMSRVAQPASKKIDQNKLKPEMDEKGNLTTAGFACSQCGQPLFVYKLEQVSEKGKAYTNYFGRCNVAEHEKLILLAQLKPEKDSDEAVTYSLGKFGQRALDFYSIHVTKESTHPVKPLAQIAGNRYASGPVGKALSDACMGTIASFLSKYQDIIIEHQKVVKGNQKRLESLRELAGKENLEYPSVTLPPQPHTKEGVDAYNEVIARVRMWVNLNLWQKLKLSRDDAKPLLRLKGFPSFPLVERQANEVDWWDMVCNVKKLINEKKEDGKVFWQNLAGYKRQEALRPYLSSEEDRKKGKKFARYQLGDLLLHLEKKHGEDWGKVYDEAWERIDKKVEGLSKHIKLEEERRSEDAQSKAALTDWLRAKASFVIEGLKEADKDEFCRCELKLQKWYGDLRGKPFAIEAENSILDISGFSKQYNCAFIWQKDGVKKLNLYLIINYFKGGKLRFKKIKPEAFEANRFYTVINKKSGEIVPMEVNFNFDDPNLIILPLAFGKRQGREFIWNDLLSLETGSLKLANGRVIEKTLYNRRTRQDEPALFVALTFERREVLDSSNIKPMNLIGVDRGENIPAVIALTDPEGCPLSRFKDSLGNPTHILRIGESYKEKQRTIQAKKEVEQRRAGGYSRKYASKAKNLADDMVRNTARDLLYYAVTQDAMLIFENLSRGFGRQGKRTFMAERQYTRMEDWLTAKLAYEGLPSKTYLSKTLAQYTSKTCSNCGFTITSADYDRVLEKLKKTATGWMTTINGKELKVEGQITYYNRYKRQNVVKDLSVELDRLSEESVNNDISSWTKGRSGEALSLLKKRFSHRPVQEKFVCLNCGFETHADEQAALNIARSWLFLRSQEYKKYQTNKTTGNTDKRAFVETWQSFYRKKLKEVWKPAV

SEQ ID NO: 684 - protein, 978 aa, Artificial Sequence
  CasX Variant
QEIKRANKIRRRLVKDSNTKKAGKTGPMKTLLVRVMTPDLRERLENLRKKPENIPQPISNTSRANLNKLLTDYTEMKKAILHVYWEEFQKDPVGLMSRVAQPASKKIDQNKLKPEMDEKGNLTTAGFACSQCGQPLFVYKLEQVSEKGKAYTNYFGRCNVAEHEKLILLAQLKPEKDSDEAVTYSLGKFGQRALDFYSIHVTKESTHPVKPLAQIAGNRYASGPVGKALSDACMGTIASFLSKYQDIIIEHQKVVKGNQKRLESLRELAGKENLEYPSVTLPPQPHTKEGVDAYNEVIARVRMWVNLNLWQKLKLSRDDAKPLLRLKGFPSFPLVERQANEVDWWDMVCNVKKLINEKKEDGKVFWQNLAGYKRQEALRPYLSSEEDRKKGKKFARYQLGDLLLHLEKKHGEDWGKVYDEAWERIDKKVEGLSKHIKLEEERRSEDAQSKAALTDWLRAKASFVIEGLKEADKDEFCRCELKLQKWYGDLRGKPFAIEAENSILDISGFSKQYNCAFIWQKDGVKKLNLYLIINYFKGGKLRFKKIKPEAFEANRFYTVINKKSGEIVPMEVNFNFDDPNLIILPLAFGKRQGREFIWNDLLSLETGSLKLANGRVIEKTLYNRRTRQDEPALFVALTFERREVLDSSNIKPMNLIGVDRGENIPAVIALTDPEGCPLSRFKDSLGNPTHILRIGESYKEKQRTIQAKKEVEQRRAGGYSRKYASKAKNLADDMVRNTARDLLYYAVTQDAMLIFENLSRGFGRQGKRTFMAERQYTRMEDWLTAKLAYEGLPSKTYLSKTLAQYTSKTCSNCGFTITSADYDRVLEKLKKTATGWMTTINGKELKVEGQITYYNRYKRQNVVKDLSVELDRLSEESVNNDISSWTKGRSGEALSLLKKRFSHRPVQEKFVCLNCGFETHADEQAALNIARSWLFLRSQEYKKYQTNKTTGNTDKRAFVETWQSFYRKKLKEVWKPAV

SEQ ID NO: 685 - protein, 979 aa, Artificial Sequence
  CasX Variant
QEIKRGINKIRRRLVKDSNTKKAGKTGPMKTLLVRVMTPDLRERLENLRKKPENIPQPISNTSRANLNKLLTDYTEMKKAILHVYWEEFQKDPVGLMSRVAQPASKKIDQNKLKPEMDEKGNLTTAGFACSQCGQPLFVYKLEQVSEKGKAYTNYFGRCNVAEHEKLILLAQLKPEKDSDEAVTYSLGKFGQRALDFYSIHVTKESTHPVKPLAQIAGNRYASGPVGKALSDACMGTIASFLSKYQDIIIEHQKVVKGNQKRLESLRELAGKENLEYPSVTLPPQPHTKEGVDAYNEVIARVRMWVNLNLWQKLKLSRDDAKPLLRLKGFPSFPLVERQANEVDWWDMVCNVKKLINEKKEDGKVFWQNLAGYKRQEALRPYLSSEEDRKKGKKFARYQLGDLLLHLEKKHGEDWGKVYDEAWERIDKKVEGLSKHIKLEEERRSEDAQSKAALTDWLRAKASFVIEGLKEADKDEFCRCELKLQKWYGDLRGKPFAIEAENSILDISGFSKQYNCAFIWQKDGVKKLNLYLIINYFKGGKLRFKKIKPEAFEANRFYTVINKKSGEIVPMEVNFNFDDPNLIILPLAFGKRQGREFIWNDLLSLETGSLKLANGRVIEKTLYNRRTRQDEPALFVALTFERREVLDSSNIKPMNLIGVDRGENIPAVIALTDPEGCPLSRFKDSLGNPTHILRIGESYKEKQRTIQAKKEVEQRRAGGYSRKYASKAKNLADDMVRNTARDLLYYAVTQDAMLIFENLSRGFGRQGKRTFMAERQYTRMEDWLTAKLAYEGLPSKTYLSKTLAQYTSKTCSNCGFTITSADYDRVLEKLKKTATGWMTTINGKELKVEGQITYYNRYKRQNVVKDLSVELDRLSEESVNNDISSWTKGRSGEALSLLKKRFSHRPVQEKFVCLNCGFETHADEQAALNIARSWLFLRSQEYKKYQTNKTTGNTDKRAFVETWQSFYRKKLKEVWKPAV

SEQ ID NO: 686 - protein, 978 aa, Artificial Sequence
  CasX Variant
QEIKRISKIRRRLVKDSNTKKAGKTGPMKTLLVRVMTPDLRERLENLRKKPENIPQPISNTSRANLNKLLTDYTEMKKAILHVYWEEFQKDPVGLMSRVAQPASKKIDQNKLKPEMDEKGNLTTAGFACSQCGQPLFVYKLEQVSEKGKAYTNYFGRCNVAEHEKLILLAQLKPEKDSDEAVTYSLGKFGQRALDFYSIHVTKESTHPVKPLAQIAGNRYASGPVGKALSDACMGTIASFLSKYQDIIIEHQKVVKGNQKRLESLRELAGKENLEYPSVTLPPQPHTKEGVDAYNEVIARVRMWVNLNLWQKLKLSRDDAKPLLRLKGFPSFPLVERQANEVDWWDMVCNVKKLINEKKEDGKVFWQNLAGYKRQEALRPYLSSEEDRKKGKKFARYQLGDLLLHLEKKHGEDWGKVYDEAWERIDKKVEGLSKHIKLEEERRSEDAQSKAALTDWLRAKASFVIEGLKEADKDEFCRCELKLQKWYGDLRGKPFAIEAENSILDISGFSKQYNCAFIWQKDGVKKLNLYLIINYFKGGKLRFKKIKPEAFEANRFYTVINKKSGEIVPMEVNFNFDDPNLIILPLAFGKRQGREFIWNDLLSLETGSLKLANGRVIEKTLYNRRTRQDEPALFVALTFERREVLDSSNIKPMNLIGVDRGENIPAVIALTDPEGCPLSRFKDSLGNPTHILRIGESYKEKQRTIQAKKEVEQRRAGGYSRKYASKAKNLADDMVRNTARDLLYYAVTQDAMLIFENLSRGFGRQGKRTFMAERQYTRMEDWLTAKLAYEGLPSKTYLSKTLAQYTSKTCSNCGFTITSADYDRVLEKLKKTATGWMTTINGKELKVEGQITYYNRYKRQNVVKDLSVELDRLSEESVNNDISSWTKGRSGEALSLLKKRFSHRPVQEKFVCLNCGFETHADEQAALNIARSWLFLRSQEYKKYQTNKTTGNTDKRAFVETWQSFYRKKLKEVWKPAV

SEQ ID NO: 687 - protein, 978 aa, Artificial Sequence
  CasX Variant
QEIKRINGIRRRLVKDSNTKKAGKTGPMKTLLVRVMTPDLRERLENLRKKPENIPQPISNTSRANLNKLLTDYTEMKKAILHVYWEEFQKDPVGLMSRVAQPASKKIDQNKLKPEMDEKGNLTTAGFACSQCGQPLFVYKLEQVSEKGKAYTNYFGRCNVAEHEKLILLAQLKPEKDSDEAVTYSLGKFGQRALDFYSIHVTKESTHPVKPLAQIAGNRYASGPVGKALSDACMGTIASFLSKYQDIIIEHQKVVKGNQKRLESLRELAGKENLEYPSVTLPPQPHTKEGVDAYNEVIARVRMWVNLNLWQKLKLSRDDAKPLLRLKGFPSFPLVERQANEVDWWDMVCNVKKLINEKKEDGKVFWQNLAGYKRQEALRPYLSSEEDRKKGKKFARYQLGDLLLHLEKKHGEDWGKVYDEAWERIDKKVEGLSKHIKLEEERRSEDAQSKAALTDWLRAKASFVIEGLKEADKDEFCRCELKLQKWYGDLRGKPFAIEAENSILDISGFSKQYNCAFIWQKDGVKKLNLYLIINYFKGGKLRFKKIKPEAFEANRFYTVINKKSGEIVPMEVNFNFDDPNLIILPLAFGKRQGREFIWNDLLSLETGSLKLANGRVIEKTLYNRRTRQDEPALFVALTFERREVLDSSNIKPMNLIGVDRGENIPAVIALTDPEGCPLSRFKDSLGNPTHILRIGESYKEKQRTIQAKKEVEQRRAGGYSRKYASKAKNLADDMVRNTARDLLYYAVTQDAMLIFENLSRGFGRQGKRTFMAERQYTRMEDWLTAKLAYEGLPSKTYLSKTLAQYTSKTCSNCGFTITSADYDRVLEKLKKTATGWMTTINGKELKVEGQITYYNRYKRQNVVKDLSVELDRLSEESVNNDISSWTKGRSGEALSLLKKRFSHRPVQEKFVCLNCGFETHADEQAALNIARSWLFLRSQEYKKYQTNKTTGNTDKRAFVETWQSFYRKKLKEVWKPAV

SEQ ID NO: 688 - protein, 979 aa, Artificial Sequence
  CasX Variant
QEIKRINKIRRRLVKFDSNTKKAGKTGPMKTLLVRVMTPDLRERLENLRKKPENIPQPISNTSRANLNKLLTDYTEMKKAILHVYWEEFQKDPVGLMSRVAQPASKKIDQNKLKPEMDEKGNLTTAGFACSQCGQPLFVYKLEQVSEKGKAYTNYFGRCNVAEHEKLILLAQLKPEKDSDEAVTYSLGKFGQRALDFYSIHVTKESTHPVKPLAQIAGNRYASGPVGKALSDACMGTIASFLSKYQDIIIEHQKVVKGNQKRLESLRELAGKENLEYPSVTLPPQPHTKEGVDAYNEVIARVRMWVNLNLWQKLKLSRDDAKPLLRLKGFPSFPLVERQANEVDWWDMVCNVKKLINEKKEDGKVFWQNLAGYKRQEALRPYLSSEEDRKKGKKFARYQLGDLLLHLEKKHGEDWGKVYDEAWERIDKKVEGLSKHIKLEEERRSEDAQSKAALTDWLRAKASFVIEGLKEADKDEFCRCELKLQKWYGDLRGKPFAIEAENSILDISGFSKQYNCAFIWQKDGVKKLNLYLIINYFKGGKLRFKKIKPEAFEANRFYTVINKKSGEIVPMEVNFNFDDPNLIILPLAFGKRQGREFIWNDLLSLETGSLKLANGRVIEKTLYNRRTRQDEPALFVALTFERREVLDSSNIKPMNLIGVDRGENIPAVIALTDPEGCPLSRFKDSLGNPTHILRIGESYKEKQRTIQAKKEVEQRRAGGYSRKYASKAKNLADDMVRNTARDLLYYAVTQDAMLIFENLSRGFGRQGKRTFMAERQYTRMEDWLTAKLAYEGLPSKTYLSKTLAQYTSKTCSNCGFTITSADYDRVLEKLKKTATGWMTTINGKELKVEGQITYYNRYKRQNVVKDLSVELDRLSEESVNNDISSWTKGRSGEALSLLKKRFSHRPVQEKFVCLNCGFETHADEQAALNIARSWLFLRSQEYKKYQTNKTTGNTDKRAFVETWQSFYRKKLKEVWKPAV

SEQ ID NO: 689 - protein, 979 aa, Artificial Sequence
  CasX Variant
QEIKRINKIRRRLVKDSFNTKKAGKTGPMKTLLVRVMTPDLRERLENLRKKPENIPQPISNTSRANLNKLLTDYTEMKKAILHVYWEEFQKDPVGLMSRVAQPASKKIDQNKLKPEMDEKGNLTTAGFACSQCGQPLFVYKLEQVSEKGKAYTNYFGRCNVAEHEKLILLAQLKPEKDSDEAVTYSLGKFGQRALDFYSIHVTKESTHPVKPLAQIAGNRYASGPVGKALSDACMGTIASFLSKYQDIIIEHQKVVKGNQKRLESLRELAGKENLEYPSVTLPPQPHTKEGVDAYNEVIARVRMWVNLNLWQKLKLSRDDAKPLLRLKGFPSFPLVERQANEVDWWDMVCNVKKLINEKKEDGKVFWQNLAGYKRQEALRPYLSSEEDRKKGKKFARYQLGDLLLHLEKKHGEDWGKVYDEAWERIDKKVEGLSKHIKLEEERRSEDAQSKAALTDWLRAKASFVIEGLKEADKDEFCRCELKLQKWYGDLRGKPFAIEAENSILDISGFSKQYNCAFIWQKDGVKKLNLYLIINYFKGGKLRFKKIKPEAFEANRFYTVINKKSGEIVPMEVNFNFDDPNLIILPLAFGKRQGREFIWNDLLSLETGSLKLANGRVIEKTLYNRRTRQDEPALFVALTFERREVLDSSNIKPMNLIGVDRGENIPAVIALTDPEGCPLSRFKDSLGNPTHILRIGESYKEKQRTIQAKKEVEQRRAGGYSRKYASKAKNLADDMVRNTARDLLYYAVTQDAMLIFENLSRGFGRQGKRTFMAERQYTRMEDWLTAKLAYEGLPSKTYLSKTLAQYTSKTCSNCGFTITSADYDRVLEKLKKTATGWMTTINGKELKVEGQITYYNRYKRQNVVKDLSVELDRLSEESVNNDISSWTKGRSGEALSLLKKRFSHRPVQEKFVCLNCGFETHADEQAALNIARSWLFLRSQEYKKYQTNKTTGNTDKRAFVETWQSFYRKKLKEVWKPAV

SEQ ID NO: 690 - protein, 978 aa, Artificial Sequence
  CasX Variant
QEIKRINKIRRRLVKDSNTKKAGKTGPMKTLLVPVMTPDLRERLENLRKKPENIPQPISNTSRANLNKLLTDYTEMKKAILHVYWEEFQKDPVGLMSRVAQPASKKIDQNKLKPEMDEKGNLTTAGFACSQCGQPLFVYKLEQVSEKGKAYTNYFGRCNVAEHEKLILLAQLKPEKDSDEAVTYSLGKFGQRALDFYSIHVTKESTHPVKPLAQIAGNRYASGPVGKALSDACMGTIASFLSKYQDIIIEHQKVVKGNQKRLESLRELAGKENLEYPSVTLPPQPHTKEGVDAYNEVIARVRMWVNLNLWQKLKLSRDDAKPLLRLKGFPSFPLVERQANEVDWWDMVCNVKKLINEKKEDGKVFWQNLAGYKRQEALRPYLSSEEDRKKGKKFARYQLGDLLLHLEKKHGEDWGKVYDEAWERIDKKVEGLSKHIKLEEERRSEDAQSKAALTDWLRAKASFVIEGLKEADKDEFCRCELKLQKWYGDLRGKPFAIEAENSILDISGFSKQYNCAFIWQKDGVKKLNLYLIINYFKGGKLRFKKIKPEAFEANRFYTVINKKSGEIVPMEVNFNFDDPNLIILPLAFGKRQGREFIWNDLLSLETGSLKLANGRVIEKTLYNRRTRQDEPALFVALTFERREVLDSSNIKPMNLIGVDRGENIPAVIALTDPEGCPLSRFKDSLGNPTHILRIGESYKEKQRTIQAKKEVEQRRAGGYSRKYASKAKNLADDMVRNTARDLLYYAVTQDAMLIFENLSRGFGRQGKRTFMAERQYTRMEDWLTAKLAYEGLPSKTYLSKTLAQYTSKTCSNCGFTITSADYDRVLEKLKKTATGWMTTINGKELKVEGQITYYNRYKRQNVVKDLSVELDRLSEESVNNDISSWTKGRSGEALSLLKKRFSHRPVQEKFVCLNCGFETHADEQAALNIARSWLFLRSQEYKKYQTNKTTGNTDKRAFVETWQSFYRKKLKEVWKPAV

SEQ ID NO: 691 - protein, 978 aa, Artificial Sequence
  CasX Variant
QEIKRINKIRRRLVKDSNTKKAGKTGPMKTLLVRVMTPDLRERLENLRKKPPNIPQPISNTSRANLNKLLTDYTEMKKAILHVYWEEFQKDPVGLMSRVAQPASKKIDQNKLKPEMDEKGNLTTAGFACSQCGQPLFVYKLEQVSEKGKAYTNYFGRCNVAEHEKLILLAQLKPEKDSDEAVTYSLGKFGQRALDFYSIHVTKESTHPVKPLAQIAGNRYASGPVGKALSDACMGTIASFLSKYQDIIIEHQKVVKGNQKRLESLRELAGKENLEYPSVTLPPQPHTKEGVDAYNEVIARVRMWVNLNLWQKLKLSRDDAKPLLRLKGFPSFPLVERQANEVDWWDMVCNVKKLINEKKEDGKVFWQNLAGYKRQEALRPYLSSEEDRKKGKKFARYQLGDLLLHLEKKHGEDWGKVYDEAWERIDKKVEGLSKHIKLEEERRSEDAQSKAALTDWLRAKASFVIEGLKEADKDEFCRCELKLQKWYGDLRGKPFAIEAENSILDISGFSKQYNCAFIWQKDGVKKLNLYLIINYFKGGKLRFKKIKPEAFEANRFYTVINKKSGEIVPMEVNFNFDDPNLIILPLAFGKRQGREFIWNDLLSLETGSLKLANGRVIEKTLYNRRTRQDEPALFVALTFERREVLDSSNIKPMNLIGVDRGENIPAVIALTDPEGCPLSRFKDSLGNPTHILRIGESYKEKQRTIQAKKEVEQRRAGGYSRKYASKAKNLADDMVRNTARDLLYYAVTQDAMLIFENLSRGFGRQGKRTFMAERQYTRMEDWLTAKLAYEGLPSKTYLSKTLAQYTSKTCSNCGFTITSADYDRVLEKLKKTATGWMTTINGKELKVEGQITYYNRYKRQNVVKDLSVELDRLSEESVNNDISSWTKGRSGEALSLLKKRFSHRPVQEKFVCLNCGFETHADEQAALNIARSWLFLRSQEYKKYQTNKTTGNTDKRAFVETWQSFYRKKLKEVWKPAV

SEQ ID NO: 692 - protein, 979 aa, Artificial Sequence
  CasX Variant
QEIKRINKIRRRLVKDSNTKKAGKTGPMKTLLVRVMTPDLRERLENLRKKPENIPPQPISNTSRANLNKLLTDYTEMKKAILHVYWEEFQKDPVGLMSRVAQPASKKIDQNKLKPEMDEKGNLTTAGFACSQCGQPLFVYKLEQVSEKGKAYTNYFGRCNVAEHEKLILLAQLKPEKDSDEAVTYSLGKFGQRALDFYSIHVTKESTHPVKPLAQIAGNRYASGPVGKALSDACMGTIASFLSKYQDIIIEHQKVVKGNQKRLESLRELAGKENLEYPSVTLPPQPHTKEGVDAYNEVIARVRMWVNLNLWQKLKLSRDDAKPLLRLKGFPSFPLVERQANEVDWWDMVCNVKKLINEKKEDGKVFWQNLAGYKRQEALRPYLSSEEDRKKGKKFARYQLGDLLLHLEKKHGEDWGKVYDEAWERIDKKVEGLSKHIKLEEERRSEDAQSKAALTDWLRAKASFVIEGLKEADKDEFCRCELKLQKWYGDLRGKPFAIEAENSILDISGFSKQYNCAFIWQKDGVKKLNLYLIINYFKGGKLRFKKIKPEAFEANRFYTVINKKSGEIVPMEVNFNFDDPNLIILPLAFGKRQGREFIWNDLLSLETGSLKLANGRVIEKTLYNRRTRQDEPALFVALTFERREVLDSSNIKPMNLIGVDRGENIPAVIALTDPEGCPLSRFKDSLGNPTHILRIGESYKEKQRTIQAKKEVEQRRAGGYSRKYASKAKNLADDMVRNTARDLLYYAVTQDAMLIFENLSRGFGRQGKRTFMAERQYTRMEDWLTAKLAYEGLPSKTYLSKTLAQYTSKTCSNCGFTITSADYDRVLEKLKKTATGWMTTINGKELKVEGQITYYNRYKRQNVVKDLSVELDRLSEESVNNDISSWTKGRSGEALSLLKKRFSHRPVQEKFVCLNCGFETHADEQAALNIARSWLFLRSQEYKKYQTNKTTGNTDKRAFVETWQSFYRKKLKEVWKPAV

SEQ ID NO: 693 - protein, 978 aa, Artificial Sequence
  CasX Variant
QEIKRINKIRRRLVKDSNTKKAGKTGPMKTLLVRVMTPDLRERLENLRKKPENIPPPISNTSRANLNKLLTDYTEMKKAILHVYWEEFQKDPVGLMSRVAQPASKKIDQNKLKPEMDEKGNLTTAGFACSQCGQPLFVYKLEQVSEKGKAYTNYFGRCNVAEHEKLILLAQLKPEKDSDEAVTYSLGKFGQRALDFYSIHVTKESTHPVKPLAQIAGNRYASGPVGKALSDACMGTIASFLSKYQDIIIEHQKVVKGNQKRLESLRELAGKENLEYPSVTLPPQPHTKEGVDAYNEVIARVRMWVNLNLWQKLKLSRDDAKPLLRLKGFPSFPLVERQANEVDWWDMVCNVKKLINEKKEDGKVFWQNLAGYKRQEALRPYLSSEEDRKKGKKFARYQLGDLLLHLEKKHGEDWGKVYDEAWERIDKKVEGLSKHIKLEEERRSEDAQSKAALTDWLRAKASFVIEGLKEADKDEFCRCELKLQKWYGDLRGKPFAIEAENSILDISGFSKQYNCAFIWQKDGVKKLNLYLIINYFKGGKLRFKKIKPEAFEANRFYTVINKKSGEIVPMEVNFNFDDPNLIILPLAFGKRQGREFIWNDLLSLETGSLKLANGRVIEKTLYNRRTRQDEPALFVALTFERREVLDSSNIKPMNLIGVDRGENIPAVIALTDPEGCPLSRFKDSLGNPTHILRIGESYKEKQRTIQAKKEVEQRRAGGYSRKYASKAKNLADDMVRNTARDLLYYAVTQDAMLIFENLSRGFGRQGKRTFMAERQYTRMEDWLTAKLAYEGLPSKTYLSKTLAQYTSKTCSNCGFTITSADYDRVLEKLKKTATGWMTTINGKELKVEGQITYYNRYKRQNVVKDLSVELDRLSEESVNNDISSWTKGRSGEALSLLKKRFSHRPVQEKFVCLNCGFETHADEQAALNIARSWLFLRSQEYKKYQTNKTTGNTDKRAFVETWQSFYRKKLKEVWKPAV

SEQ ID NO: 694 - protein, 978 aa, Artificial Sequence
  CasX Variant
QEIKRINKIRRRLVKDSNTKKAGKTGPMKTLLVRVMTPDLRERLENLRKKPENIPQPISNTSSANLNKLLTDYTEMKKAILHVYWEEFQKDPVGLMSRVAQPASKKIDQNKLKPEMDEKGNLTTAGFACSQCGQPLFVYKLEQVSEKGKAYTNYFGRCNVAEHEKLILLAQLKPEKDSDEAVTYSLGKFGQRALDFYSIHVTKESTHPVKPLAQIAGNRYASGPVGKALSDACMGTIASFLSKYQDIIIEHQKVVKGNQKRLESLRELAGKENLEYPSVTLPPQPHTKEGVDAYNEVIARVRMWVNLNLWQKLKLSRDDAKPLLRLKGFPSFPLVERQANEVDWWDMVCNVKKLINEKKEDGKVFWQNLAGYKRQEALRPYLSSEEDRKKGKKFARYQLGDLLLHLEKKHGEDWGKVYDEAWERIDKKVEGLSKHIKLEEERRSEDAQSKAALTDWLRAKASFVIEGLKEADKDEFCRCELKLQKWYGDLRGKPFAIEAENSILDISGFSKQYNCAFIWQKDGVKKLNLYLIINYFKGGKLRFKKIKPEAFEANRFYTVINKKSGEIVPMEVNFNFDDPNLIILPLAFGKRQGREFIWNDLLSLETGSLKLANGRVIEKTLYNRRTRQDEPALFVALTFERREVLDSSNIKPMNLIGVDRGENIPAVIALTDPEGCPLSRFKDSLGNPTHILRIGESYKEKQRTIQAKKEVEQRRAGGYSRKYASKAKNLADDMVRNTARDLLYYAVTQDAMLIFENLSRGFGRQGKRTFMAERQYTRMEDWLTAKLAYEGLPSKTYLSKTLAQYTSKTCSNCGFTITSADYDRVLEKLKKTATGWMTTINGKELKVEGQITYYNRYKRQNVVKDLSVELDRLSEESVNNDISSWTKGRSGEALSLLKKRFSHRPVQEKFVCLNCGFETHADEQAALNIARSWLFLRSQEYKKYQTNKTTGNTDKRAFVETWQSFYRKKLKEVWKPAV

SEQ ID NO: 695 - protein, 978 aa, Artificial Sequence
  CasX Variant
QEIKRINKIRRRLVKDSNTKKAGKTGPMKTLLVRVMTPDLRERLENLRKKPENIPQPISNTSQANLNKLLTDYTEMKKAILHVYWEEFQKDPVGLMSRVAQPASKKIDQNKLKPEMDEKGNLTTAGFACSQCGQPLFVYKLEQVSEKGKAYTNYFGRCNVAEHEKLILLAQLKPEKDSDEAVTYSLGKFGQRALDFYSIHVTKESTHPVKPLAQIAGNRYASGPVGKALSDACMGTIASFLSKYQDIIIEHQKVVKGNQKRLESLRELAGKENLEYPSVTLPPQPHTKEGVDAYNEVIARVRMWVNLNLWQKLKLSRDDAKPLLRLKGFPSFPLVERQANEVDWWDMVCNVKKLINEKKEDGKVFWQNLAGYKRQEALRPYLSSEEDRKKGKKFARYQLGDLLLHLEKKHGEDWGKVYDEAWERIDKKVEGLSKHIKLEEERRSEDAQSKAALTDWLRAKASFVIEGLKEADKDEFCRCELKLQKWYGDLRGKPFAIEAENSILDISGFSKQYNCAFIWQKDGVKKLNLYLIINYFKGGKLRFKKIKPEAFEANRFYTVINKKSGEIVPMEVNFNFDDPNLIILPLAFGKRQGREFIWNDLLSLETGSLKLANGRVIEKTLYNRRTRQDEPALFVALTFERREVLDSSNIKPMNLIGVDRGENIPAVIALTDPEGCPLSRFKDSLGNPTHILRIGESYKEKQRTIQAKKEVEQRRAGGYSRKYASKAKNLADDMVRNTARDLLYYAVTQDAMLIFENLSRGFGRQGKRTFMAERQYTRMEDWLTAKLAYEGLPSKTYLSKTLAQYTSKTCSNCGFTITSADYDRVLEKLKKTATGWMTTINGKELKVEGQITYYNRYKRQNVVKDLSVELDRLSEESVNNDISSWTKGRSGEALSLLKKRFSHRPVQEKFVCLNCGFETHADEQAALNIARSWLFLRSQEYKKYQTNKTTGNTDKRAFVETWQSFYRKKLKEVWKPAV

SEQ ID NO: 696 - protein, 978 aa, Artificial Sequence
  CasX Variant
QEIKRINKIRRRLVKDSNTKKAGKTGPMKTLLVRVMTPDLRERLENLRKKPENIPQPISNTSRANLNKLLTDYTEMKKAITHVYWEEFQKDPVGLMSRVAQPASKKIDQNKLKPEMDEKGNLTTAGFACSQCGQPLFVYKLEQVSEKGKAYTNYFGRCNVAEHEKLILLAQLKPEKDSDEAVTYSLGKFGQRALDFYSIHVTKESTHPVKPLAQIAGNRYASGPVGKALSDACMGTIASFLSKYQDIIIEHQKVVKGNQKRLESLRELAGKENLEYPSVTLPPQPHTKEGVDAYNEVIARVRMWVNLNLWQKLKLSRDDAKPLLRLKGFPSFPLVERQANEVDWWDMVCNVKKLINEKKEDGKVFWQNLAGYKRQEALRPYLSSEEDRKKGKKFARYQLGDLLLHLEKKHGEDWGKVYDEAWERIDKKVEGLSKHIKLEEERRSEDAQSKAALTDWLRAKASFVIEGLKEADKDEFCRCELKLQKWYGDLRGKPFAIEAENSILDISGFSKQYNCAFIWQKDGVKKLNLYLIINYFKGGKLRFKKIKPEAFEANRFYTVINKKSGEIVPMEVNFNFDDPNLIILPLAFGKRQGREFIWNDLLSLETGSLKLANGRVIEKTLYNRRTRQDEPALFVALTFERREVLDSSNIKPMNLIGVDRGENIPAVIALTDPEGCPLSRFKDSLGNPTHILRIGESYKEKQRTIQAKKEVEQRRAGGYSRKYASKAKNLADDMVRNTARDLLYYAVTQDAMLIFENLSRGFGRQGKRTFMAERQYTRMEDWLTAKLAYEGLPSKTYLSKTLAQYTSKTCSNCGFTITSADYDRVLEKLKKTATGWMTTINGKELKVEGQITYYNRYKRQNVVKDLSVELDRLSEESVNNDISSWTKGRSGEALSLLKKRFSHRPVQEKFVCLNCGFETHADEQAALNIARSWLFLRSQEYKKYQTNKTTGNTDKRAFVETWQSFYRKKLKEVWKPAV

SEQ ID NO: 697 - protein, 978 aa, Artificial Sequence
  CasX Variant
QEIKRINKIRRRLVKDSNTKKAGKTGPMKTLLVRVMTPDLRERLENLRKKPENIPQPISNTSRANLNKLLTDYTEMKKAILHVYGEEFQKDPVGLMSRVAQPASKKIDQNKLKPEMDEKGNLTTAGFACSQCGQPLFVYKLEQVSEKGKAYTNYFGRCNVAEHEKLILLAQLKPEKDSDEAVTYSLGKFGQRALDFYSIHVTKESTHPVKPLAQIAGNRYASGPVGKALSDACMGTIASFLSKYQDIIIEHQKVVKGNQKRLESLRELAGKENLEYPSVTLPPQPHTKEGVDAYNEVIARVRMWVNLNLWQKLKLSRDDAKPLLRLKGFPSFPLVERQANEVDWWDMVCNVKKLINEKKEDGKVFWQNLAGYKRQEALRPYLSSEEDRKKGKKFARYQLGDLLLHLEKKHGEDWGKVYDEAWERIDKKVEGLSKHIKLEEERRSEDAQSKAALTDWLRAKASFVIEGLKEADKDEFCRCELKLQKWYGDLRGKPFAIEAENSILDISGFSKQYNCAFIWQKDGVKKLNLYLIINYFKGGKLRFKKIKPEAFEANRFYTVINKKSGEIVPMEVNFNFDDPNLIILPLAFGKRQGREFIWNDLLSLETGSLKLANGRVIEKTLYNRRTRQDEPALFVALTFERREVLDSSNIKPMNLIGVDRGENIPAVIALTDPEGCPLSRFKDSLGNPTHILRIGESYKEKQRTIQAKKEVEQRRAGGYSRKYASKAKNLADDMVRNTARDLLYYAVTQDAMLIFENLSRGFGRQGKRTFMAERQYTRMEDWLTAKLAYEGLPSKTYLSKTLAQYTSKTCSNCGFTITSADYDRVLEKLKKTATGWMTTINGKELKVEGQITYYNRYKRQNVVKDLSVELDRLSEESVNNDISSWTKGRSGEALSLLKKRFSHRPVQEKFVCLNCGFETHADEQAALNIARSWLFLRSQEYKKYQTNKTTGNTDKRAFVETWQSFYRKKLKEVWKPAV

SEQ ID NO: 698 - protein, 978 aa, Artificial Sequence
  CasX Variant
QEIKRINKIRRRLVKDSNTKKAGKTGPMKTLLVRVMTPDLRERLENLRKKPENIPQPISNTSRANLNKLLTDYTEMKKAILHVYDEEFQKDPVGLMSRVAQPASKKIDQNKLKPEMDEKGNLTTAGFACSQCGQPLFVYKLEQVSEKGKAYTNYFGRCNVAEHEKLILLAQLKPEKDSDEAVTYSLGKFGQRALDFYSIHVTKESTHPVKPLAQIAGNRYASGPVGKALSDACMGTIASFLSKYQDIIIEHQKVVKGNQKRLESLRELAGKENLEYPSVTLPPQPHTKEGVDAYNEVIARVRMWVNLNLWQKLKLSRDDAKPLLRLKGFPSFPLVERQANEVDWWDMVCNVKKLINEKKEDGKVFWQNLAGYKRQEALRPYLSSEEDRKKGKKFARYQLGDLLLHLEKKHGEDWGKVYDEAWERIDKKVEGLSKHIKLEEERRSEDAQSKAALTDWLRAKASFVIEGLKEADKDEFCRCELKLQKWYGDLRGKPFAIEAENSILDISGFSKQYNCAFIWQKDGVKKLNLYLIINYFKGGKLRFKKIKPEAFEANRFYTVINKKSGEIVPMEVNFNFDDPNLIILPLAFGKRQGREFIWNDLLSLETGSLKLANGRVIEKTLYNRRTRQDEPALFVALTFERREVLDSSNIKPMNLIGVDRGENIPAVIALTDPEGCPLSRFKDSLGNPTHILRIGESYKEKQRTIQAKKEVEQRRAGGYSRKYASKAKNLADDMVRNTARDLLYYAVTQDAMLIFENLSRGFGRQGKRTFMAERQYTRMEDWLTAKLAYEGLPSKTYLSKTLAQYTSKTCSNCGFTITSADYDRVLEKLKKTATGWMTTINGKELKVEGQITYYNRYKRQNVVKDLSVELDRLSEESVNNDISSWTKGRSGEALSLLKKRFSHRPVQEKFVCLNCGFETHADEQAALNIARSWLFLRSQEYKKYQTNKTTGNTDKRAFVETWQSFYRKKLKEVWKPAV

SEQ ID NO: 699 - protein, 978 aa, Artificial Sequence
  CasX Variant
QEIKRINKIRRRLVKDSNTKKAGKTGPMKTLLVRVMTPDLRERLENLRKKPENIPQPISNTSRANLNKLLTDYTEMKKAILHVYAEEFQKDPVGLMSRVAQPASKKIDQNKLKPEMDEKGNLTTAGFACSQCGQPLFVYKLEQVSEKGKAYTNYFGRCNVAEHEKLILLAQLKPEKDSDEAVTYSLGKFGQRALDFYSIHVTKESTHPVKPLAQIAGNRYASGPVGKALSDACMGTIASFLSKYQDIIIEHQKVVKGNQKRLESLRELAGKENLEYPSVTLPPQPHTKEGVDAYNEVIARVRMWVNLNLWQKLKLSRDDAKPLLRLKGFPSFPLVERQANEVDWWDMVCNVKKLINEKKEDGKVFWQNLAGYKRQEALRPYLSSEEDRKKGKKFARYQLGDLLLHLEKKHGEDWGKVYDEAWERIDKKVEGLSKHIKLEEERRSEDAQSKAALTDWLRAKASFVIEGLKEADKDEFCRCELKLQKWYGDLRGKPFAIEAENSILDISGFSKQYNCAFIWQKDGVKKLNLYLIINYFKGGKLRFKKIKPEAFEANRFYTVINKKSGEIVPMEVNFNFDDPNLIILPLAFGKRQGREFIWNDLLSLETGSLKLANGRVIEKTLYNRRTRQDEPALFVALTFERREVLDSSNIKPMNLIGVDRGENIPAVIALTDPEGCPLSRFKDSLGNPTHILRIGESYKEKQRTIQAKKEVEQRRAGGYSRKYASKAKNLADDMVRNTARDLLYYAVTQDAMLIFENLSRGFGRQGKRTFMAERQYTRMEDWLTAKLAYEGLPSKTYLSKTLAQYTSKTCSNCGFTITSADYDRVLEKLKKTATGWMTTINGKELKVEGQITYYNRYKRQNVVKDLSVELDRLSEESVNNDISSWTKGRSGEALSLLKKRFSHRPVQEKFVCLNCGFETHADEQAALNIARSWLFLRSQEYKKYQTNKTTGNTDKRAFVETWQSFYRKKLKEVWKPAV

SEQ ID NO: 700 - protein, 978 aa, Artificial Sequence
  CasX Variant
QEIKRINKIRRRLVKDSNTKKAGKTGPMKTLLVRVMTPDLRERLENLRKKPENIPQPISNTSRANLNKLLTDYTEMKKAILHVYREEFQKDPVGLMSRVAQPASKKIDQNKLKPEMDEKGNLTTAGFACSQCGQPLFVYKLEQVSEKGKAYTNYFGRCNVAEHEKLILLAQLKPEKDSDEAVTYSLGKFGQRALDFYSIHVTKESTHPVKPLAQIAGNRYASGPVGKALSDACMGTIASFLSKYQDIIIEHQKVVKGNQKRLESLRELAGKENLEYPSVTLPPQPHTKEGVDAYNEVIARVRMWVNLNLWQKLKLSRDDAKPLLRLKGFPSFPLVERQANEVDWWDMVCNVKKLINEKKEDGKVFWQNLAGYKRQEALRPYLSSEEDRKKGKKFARYQLGDLLLHLEKKHGEDWGKVYDEAWERIDKKVEGLSKHIKLEEERRSEDAQSKAALTDWLRAKASFVIEGLKEADKDEFCRCELKLQKWYGDLRGKPFAIEAENSILDISGFSKQYNCAFIWQKDGVKKLNLYLIINYFKGGKLRFKKIKPEAFEANRFYTVINKKSGEIVPMEVNFNFDDPNLIILPLAFGKRQGREFIWNDLLSLETGSLKLANGRVIEKTLYNRRTRQDEPALFVALTFERREVLDSSNIKPMNLIGVDRGENIPAVIALTDPEGCPLSRFKDSLGNPTHILRIGESYKEKQRTIQAKKEVEQRRAGGYSRKYASKAKNLADDMVRNTARDLLYYAVTQDAMLIFENLSRGFGRQGKRTFMAERQYTRMEDWLTAKLAYEGLPSKTYLSKTLAQYTSKTCSNCGFTITSADYDRVLEKLKKTATGWMTTINGKELKVEGQITYYNRYKRQNVVKDLSVELDRLSEESVNNDISSWTKGRSGEALSLLKKRFSHRPVQEKFVCLNCGFETHADEQAALNIARSWLFLRSQEYKKYQTNKTTGNTDKRAFVETWQSFYRKKLKEVWKPAV

SEQ ID NO: 701 - protein, 978 aa, Artificial Sequence
  CasX Variant
QEIKRINKIRRRLVKDSNTKKAGKTGPMKTLLVRVMTPDLRERLENLRKKPENIPQPISNTSRANLNKLLTDYTEMKKAILHVYWEEFQKDPVGLMSRVAQPASKKIDQNKLKPEMDEKGNLTTAGFACSQCGQPLFVYKLEQVSEKGKAYTNYFGRCNVAEHEKLIKLAQLKPEKDSDEAVTYSLGKFGQRALDFYSIHVTKESTHPVKPLAQIAGNRYASGPVGKALSDACMGTIASFLSKYQDIIIEHQKVVKGNQKRLESLRELAGKENLEYPSVTLPPQPHTKEGVDAYNEVIARVRMWVNLNLWQKLKLSRDDAKPLLRLKGFPSFPLVERQANEVDWWDMVCNVKKLINEKKEDGKVFWQNLAGYKRQEALRPYLSSEEDRKKGKKFARYQLGDLLLHLEKKHGEDWGKVYDEAWERIDKKVEGLSKHIKLEEERRSEDAQSKAALTDWLRAKASFVIEGLKEADKDEFCRCELKLQKWYGDLRGKPFAIEAENSILDISGFSKQYNCAFIWQKDGVKKLNLYLIINYFKGGKLRFKKIKPEAFEANRFYTVINKKSGEIVPMEVNFNFDDPNLIILPLAFGKRQGREFIWNDLLSLETGSLKLANGRVIEKTLYNRRTRQDEPALFVALTFERREVLDSSNIKPMNLIGVDRGENIPAVIALTDPEGCPLSRFKDSLGNPTHILRIGESYKEKQRTIQAKKEVEQRRAGGYSRKYASKAKNLADDMVRNTARDLLYYAVTQDAMLIFENLSRGFGRQGKRTFMAERQYTRMEDWLTAKLAYEGLPSKTYLSKTLAQYTSKTCSNCGFTITSADYDRVLEKLKKTATGWMTTINGKELKVEGQITYYNRYKRQNVVKDLSVELDRLSEESVNNDISSWTKGRSGEALSLLKKRFSHRPVQEKFVCLNCGFETHADEQAALNIARSWLFLRSQEYKKYQTNKTTGNTDKRAFVETWQSFYRKKLKEVWKPAV

SEQ ID NO: 702 - protein, 978 aa, Artificial Sequence
  CasX Variant
QEIKRINKIRRRLVKDSNTKKAGKTGPMKTLLVRVMTPDLRERLENLRKKPENIPQPISNTSRANLNKLLTDYTEMKKAILHVYWEEFQKDPVGLMSRVAQPASKKIDQNKLKPEMDEKGNLTTAGFACSQCGQPLFVYKLEQVSEKGKAYTNYFGRCNVAEHEKLILLYQLKPEKDSDEAVTYSLGKFGQRALDFYSIHVTKESTHPVKPLAQIAGNRYASGPVGKALSDACMGTIASFLSKYQDIIIEHQKVVKGNQKRLESLRELAGKENLEYPSVTLPPQPHTKEGVDAYNEVIARVRMWVNLNLWQKLKLSRDDAKPLLRLKGFPSFPLVERQANEVDWWDMVCNVKKLINEKKEDGKVFWQNLAGYKRQEALRPYLSSEEDRKKGKKFARYQLGDLLLHLEKKHGEDWGKVYDEAWERIDKKVEGLSKHIKLEEERRSEDAQSKAALTDWLRAKASFVIEGLKEADKDEFCRCELKLQKWYGDLRGKPFAIEAENSILDISGFSKQYNCAFIWQKDGVKKLNLYLIINYFKGGKLRFKKIKPEAFEANRFYTVINKKSGEIVPMEVNFNFDDPNLIILPLAFGKRQGREFIWNDLLSLETGSLKLANGRVIEKTLYNRRTRQDEPALFVALTFERREVLDSSNIKPMNLIGVDRGENIPAVIALTDPEGCPLSRFKDSLGNPTHILRIGESYKEKQRTIQAKKEVEQRRAGGYSRKYASKAKNLADDMVRNTARDLLYYAVTQDAMLIFENLSRGFGRQGKRTFMAERQYTRMEDWLTAKLAYEGLPSKTYLSKTLAQYTSKTCSNCGFTITSADYDRVLEKLKKTATGWMTTINGKELKVEGQITYYNRYKRQNVVKDLSVELDRLSEESVNNDISSWTKGRSGEALSLLKKRFSHRPVQEKFVCLNCGFETHADEQAALNIARSWLFLRSQEYKKYQTNKTTGNTDKRAFVETWQSFYRKKLKEVWKPAV

SEQ ID NO: 703 - protein, 978 aa, Artificial Sequence
  CasX Variant
QEIKRINKIRRRLVKDSNTKKAGKTGPMKTLLVRVMTPDLRERLENLRKKPENIPQPISNTSRANLNKLLTDYTEMKKAILHVYWEEFQKDPVGLMSRVAQPASKKIDQNKLKPEMDEKGNLTTAGFACSQCGQPLFVYKLEQVSEKGKAYTNYFGRCNVAEHEKLILLSQLKPEKDSDEAVTYSLGKFGQRALDFYSIHVTKESTHPVKPLAQIAGNRYASGPVGKALSDACMGTIASFLSKYQDIIIEHQKVVKGNQKRLESLRELAGKENLEYPSVTLPPQPHTKEGVDAYNEVIARVRMWVNLNLWQKLKLSRDDAKPLLRLKGFPSFPLVERQANEVDWWDMVCNVKKLINEKKEDGKVFWQNLAGYKRQEALRPYLSSEEDRKKGKKFARYQLGDLLLHLEKKHGEDWGKVYDEAWERIDKKVEGLSKHIKLEEERRSEDAQSKAALTDWLRAKASFVIEGLKEADKDEFCRCELKLQKWYGDLRGKPFAIEAENSILDISGFSKQYNCAFIWQKDGVKKLNLYLIINYFKGGKLRFKKIKPEAFEANRFYTVINKKSGEIVPMEVNFNFDDPNLIILPLAFGKRQGREFIWNDLLSLETGSLKLANGRVIEKTLYNRRTRQDEPALFVALTFERREVLDSSNIKPMNLIGVDRGENIPAVIALTDPEGCPLSRFKDSLGNPTHILRIGESYKEKQRTIQAKKEVEQRRAGGYSRKYASKAKNLADDMVRNTARDLLYYAVTQDAMLIFENLSRGFGRQGKRTFMAERQYTRMEDWLTAKLAYEGLPSKTYLSKTLAQYTSKTCSNCGFTITSADYDRVLEKLKKTATGWMTTINGKELKVEGQITYYNRYKRQNVVKDLSVELDRLSEESVNNDISSWTKGRSGEALSLLKKRFSHRPVQEKFVCLNCGFETHADEQAALNIARSWLFLRSQEYKKYQTNKTTGNTDKRAFVETWQSFYRKKLKEVWKPAV

SEQ ID NO: 704 - protein, 978 aa, Artificial Sequence
  CasX Variant
QEIKRINKIRRRLVKDSNTKKAGKTGPMKTLLVRVMTPDLRERLENLRKKPENIPQPISNTSRANLNKLLTDYTEMKKAILHVYWEEFQKDPVGLMSRVAQPASKKIDQNKLKPEMDEKGNLTTAGFACSQCGQPLFVYKLEQVSEKGKAYTNYFGRCNVAEHEKLILLAQLKPPKDSDEAVTYSLGKFGQRALDFYSIHVTKESTHPVKPLAQIAGNRYASGPVGKALSDACMGTIASFLSKYQDIIIEHQKVVKGNQKRLESLRELAGKENLEYPSVTLPPQPHTKEGVDAYNEVIARVRMWVNLNLWQKLKLSRDDAKPLLRLKGFPSFPLVERQANEVDWWDMVCNVKKLINEKKEDGKVFWQNLAGYKRQEALRPYLSSEEDRKKGKKFARYQLGDLLLHLEKKHGEDWGKVYDEAWERIDKKVEGLSKHIKLEEERRSEDAQSKAALTDWLRAKASFVIEGLKEADKDEFCRCELKLQKWYGDLRGKPFAIEAENSILDISGFSKQYNCAFIWQKDGVKKLNLYLIINYFKGGKLRFKKIKPEAFEANRFYTVINKKSGEIVPMEVNFNFDDPNLIILPLAFGKRQGREFIWNDLLSLETGSLKLANGRVIEKTLYNRRTRQDEPALFVALTFERREVLDSSNIKPMNLIGVDRGENIPAVIALTDPEGCPLSRFKDSLGNPTHILRIGESYKEKQRTIQAKKEVEQRRAGGYSRKYASKAKNLADDMVRNTARDLLYYAVTQDAMLIFENLSRGFGRQGKRTFMAERQYTRMEDWLTAKLAYEGLPSKTYLSKTLAQYTSKTCSNCGFTITSADYDRVLEKLKKTATGWMTTINGKELKVEGQITYYNRYKRQNVVKDLSVELDRLSEESVNNDISSWTKGRSGEALSLLKKRFSHRPVQEKFVCLNCGFETHADEQAALNIARSWLFLRSQEYKKYQTNKTTGNTDKRAFVETWQSFYRKKLKEVWKPAV

SEQ ID NO: 705 - protein, 977 aa, Artificial Sequence
  CasX Variant
QEIKRINKIRRRLVKDSNTKKAGKTGPMKTLLVRVMTPDLRERLENLRKKPENIPQPISNTSRANLNKLLTDYTEMKKAILHVYWEEFQKDPVGLMSRVAQPASKKIDQNKLKPEMDEKGNLTTAGFACSQCGQPLFVYKLEQVSEKGKAYTNYFGRCNVAEHEKLILLAQLKPEKDSDEAVTYSLGKFGQRALDFYSIHVTKESTHPVKPLAQIAGNRYASPVGKALSDACMGTIASFLSKYQDIIIEHQKVVKGNQKRLESLRELAGKENLEYPSVTLPPQPHTKEGVDAYNEVIARVRMWVNLNLWQKLKLSRDDAKPLLRLKGFPSFPLVERQANEVDWWDMVCNVKKLINEKKEDGKVFWQNLAGYKRQEALRPYLSSEEDRKKGKKFARYQLGDLLLHLEKKHGEDWGKVYDEAWERIDKKVEGLSKHIKLEEERRSEDAQSKAALTDWLRAKASFVIEGLKEADKDEFCRCELKLQKWYGDLRGKPFAIEAENSILDISGFSKQYNCAFIWQKDGVKKLNLYLIINYFKGGKLRFKKIKPEAFEANRFYTVINKKSGEIVPMEVNFNFDDPNLIILPLAFGKRQGREFIWNDLLSLETGSLKLANGRVIEKTLYNRRTRQDEPALFVALTFERREVLDSSNIKPMNLIGVDRGENIPAVIALTDPEGCPLSRFKDSLGNPTHILRIGESYKEKQRTIQAKKEVEQRRAGGYSRKYASKAKNLADDMVRNTARDLLYYAVTQDAMLIFENLSRGFGRQGKRTFMAERQYTRMEDWLTAKLAYEGLPSKTYLSKTLAQYTSKTCSNCGFTITSADYDRVLEKLKKTATGWMTTINGKELKVEGQITYYNRYKRQNVVKDLSVELDRLSEESVNNDISSWTKGRSGEALSLLKKRFSHRPVQEKFVCLNCGFETHADEQAALNIARSWLFLRSQEYKKYQTNKTTGNTDKRAFVETWQSFYRKKLKEVWKPAV

SEQ ID NO: 706 - protein, 978 aa, Artificial Sequence; identical to SEQ ID NO: 654
  CasX Variant

SEQ ID NO: 707 - protein, 978 aa, Artificial Sequence
  CasX Variant
QEIKRINKIRRRLVKDSNTKKAGKTGPMKTLLVRVMTPDLRERLENLRKKPENIPQPISNTSRANLNKLLTDYTEMKKAILHVYWEEFQKDPVGLMSRVAQPASKKIDQNKLKPEMDEKGNLTTAGFACSQCGQPLFVYKLEQVSEKGKAYTNYFGRCNVAEHEKLILLAQLKPEKDSDEAVTYSLGKFGQRALDFYSIHVTKESTHPVKPLAQIAGNRYASGPVGKALSDACMGTIASFLSKYQDIIIEHQKVVKGNQKRLESLRELAGKENLEYPSVTLPPQPHTGEGVDAYNEVIARVRMWVNLNLWQKLKLSRDDAKPLLRLKGFPSFPLVERQANEVDWWDMVCNVKKLINEKKEDGKVFWQNLAGYKRQEALRPYLSSEEDRKKGKKFARYQLGDLLLHLEKKHGEDWGKVYDEAWERIDKKVEGLSKHIKLEEERRSEDAQSKAALTDWLRAKASFVIEGLKEADKDEFCRCELKLQKWYGDLRGKPFAIEAENSILDISGFSKQYNCAFIWQKDGVKKLNLYLIINYFKGGKLRFKKIKPEAFEANRFYTVINKKSGEIVPMEVNFNFDDPNLIILPLAFGKRQGREFIWNDLLSLETGSLKLANGRVIEKTLYNRRTRQDEPALFVALTFERREVLDSSNIKPMNLIGVDRGENIPAVIALTDPEGCPLSRFKDSLGNPTHILRIGESYKEKQRTIQAKKEVEQRRAGGYSRKYASKAKNLADDMVRNTARDLLYYAVTQDAMLIFENLSRGFGRQGKRTFMAERQYTRMEDWLTAKLAYEGLPSKTYLSKTLAQYTSKTCSNCGFTITSADYDRVLEKLKKTATGWMTTINGKELKVEGQITYYNRYKRQNVVKDLSVELDRLSEESVNNDISSWTKGRSGEALSLLKKRFSHRPVQEKFVCLNCGFETHADEQAALNIARSWLFLRSQEYKKYQTNKTTGNTDKRAFVETWQSFYRKKLKEVWKPAV

SEQ ID NO: 708 - protein, 978 aa, Artificial Sequence
  CasX Variant
QEIKRINKIRRRLVKDSNTKKAGKTGPMKTLLVRVMTPDLRERLENLRKKPENIPQPISNTSRANLNKLLTDYTEMKKAILHVYWEEFQKDPVGLMSRVAQPASKKIDQNKLKPEMDEKGNLTTAGFACSQCGQPLFVYKLEQVSEKGKAYTNYFGRCNVAEHEKLILLAQLKPEKDSDEAVTYSLGKFGQRALDFYSIHVTKESTHPVKPLAQIAGNRYASGPVGKALSDACMGTIASFLSKYQDIIIEHQKVVKGNQKRLESLRELAGKENLEYPSVTLPPQPHTSEGVDAYNEVIARVRMWVNLNLWQKLKLSRDDAKPLLRLKGFPSFPLVERQANEVDWWDMVCNVKKLINEKKEDGKVFWQNLAGYKRQEALRPYLSSEEDRKKGKKFARYQLGDLLLHLEKKHGEDWGKVYDEAWERIDKKVEGLSKHIKLEEERRSEDAQSKAALTDWLRAKASFVIEGLKEADKDEFCRCELKLQKWYGDLRGKPFAIEAENSILDISGFSKQYNCAFIWQKDGVKKLNLYLIINYFKGGKLRFKKIKPEAFEANRFYTVINKKSGEIVPMEVNFNFDDPNLIILPLAFGKRQGREFIWNDLLSLETGSLKLANGRVIEKTLYNRRTRQDEPALFVALTFERREVLDSSNIKPMNLIGVDRGENIPAVIALTDPEGCPLSRFKDSLGNPTHILRIGESYKEKQRTIQAKKEVEQRRAGGYSRKYASKAKNLADDMVRNTARDLLYYAVTQDAMLIFENLSRGFGRQGKRTFMAERQYTRMEDWLTAKLAYEGLPSKTYLSKTLAQYTSKTCSNCGFTITSADYDRVLEKLKKTATGWMTTINGKELKVEGQITYYNRYKRQNVVKDLSVELDRLSEESVNNDISSWTKGRSGEALSLLKKRFSHRPVQEKFVCLNCGFETHADEQAALNIARSWLFLRSQEYKKYQTNKTTGNTDKRAFVETWQSFYRKKLKEVWKPAV

SEQ ID NO: 709 - protein, 978 aa, Artificial Sequence
  CasX Variant
QEIKRINKIRRRLVKDSNTKKAGKTGPMKTLLVRVMTPDLRERLENLRKKPENIPQPISNTSRANLNKLLTDYTEMKKAILHVYWEEFQKDPVGLMSRVAQPASKKIDQNKLKPEMDEKGNLTTAGFACSQCGQPLFVYKLEQVSEKGKAYTNYFGRCNVAEHEKLILLAQLKPEKDSDEAVTYSLGKFGQRALDFYSIHVTKESTHPVKPLAQIAGNRYASGPVGKALSDACMGTIASFLSKYQDIIIEHQKVVKGNQKRLESLRELAGKENLEYPSVTLPPQPHTKEGLDAYNEVIARVRMWVNLNLWQKLKLSRDDAKPLLRLKGFPSFPLVERQANEVDWWDMVCNVKKLINEKKEDGKVFWQNLAGYKRQEALRPYLSSEEDRKKGKKFARYQLGDLLLHLEKKHGEDWGKVYDEAWERIDKKVEGLSKHIKLEEERRSEDAQSKAALTDWLRAKASFVIEGLKEADKDEFCRCELKLQKWYGDLRGKPFAIEAENSILDISGFSKQYNCAFIWQKDGVKKLNLYLIINYFKGGKLRFKKIKPEAFEANRFYTVINKKSGEIVPMEVNFNFDDPNLIILPLAFGKRQGREFIWNDLLSLETGSLKLANGRVIEKTLYNRRTRQDEPALFVALTFERREVLDSSNIKPMNLIGVDRGENIPAVIALTDPEGCPLSRFKDSLGNPTHILRIGESYKEKQRTIQAKKEVEQRRAGGYSRKYASKAKNLADDMVRNTARDLLYYAVTQDAMLIFENLSRGFGRQGKRTFMAERQYTRMEDWLTAKLAYEGLPSKTYLSKTLAQYTSKTCSNCGFTITSADYDRVLEKLKKTATGWMTTINGKELKVEGQITYYNRYKRQNVVKDLSVELDRLSEESVNNDISSWTKGRSGEALSLLKKRFSHRPVQEKFVCLNCGFETHADEQAALNIARSWLFLRSQEYKKYQTNKTTGNTDKRAFVETWQSFYRKKLKEVWKPAV

SEQ ID NO: 710 - protein, 978 aa, Artificial Sequence
  CasX Variant
QEIKRINKIRRRLVKDSNTKKAGKTGPMKTLLVRVMTPDLRERLENLRKKPENIPQPISNTSRANLNKLLTDYTEMKKAILHVYWEEFQKDPVGLMSRVAQPASKKIDQNKLKPEMDEKGNLTTAGFACSQCGQPLFVYKLEQVSEKGKAYTNYFGRCNVAEHEKLILLAQLKPEKDSDEAVTYSLGKFGQRALDFYSIHVTKESTHPVKPLAQIAGNRYASGPVGKALSDACMGTIASFLSKYQDIIIEHQKVVKGNQKRLESLRELAGKENLEYPSVTLPPQPHTKEGVDAYNEVIARVRTWVNLNLWQKLKLSRDDAKPLLRLKGFPSFPLVERQANEVDWWDMVCNVKKLINEKKEDGKVFWQNLAGYKRQEALRPYLSSEEDRKKGKKFARYQLGDLLLHLEKKHGEDWGKVYDEAWERIDKKVEGLSKHIKLEEERRSEDAQSKAALTDWLRAKASFVIEGLKEADKDEFCRCELKLQKWYGDLRGKPFAIEAENSILDISGFSKQYNCAFIWQKDGVKKLNLYLIINYFKGGKLRFKKIKPEAFEANRFYTVINKKSGEIVPMEVNFNFDDPNLIILPLAFGKRQGREFIWNDLLSLETGSLKLANGRVIEKTLYNRRTRQDEPALFVALTFERREVLDSSNIKPMNLIGVDRGENIPAVIALTDPEGCPLSRFKDSLGNPTHILRIGESYKEKQRTIQAKKEVEQRRAGGYSRKYASKAKNLADDMVRNTARDLLYYAVTQDAMLIFENLSRGFGRQGKRTFMAERQYTRMEDWLTAKLAYEGLPSKTYLSKTLAQYTSKTCSNCGFTITSADYDRVLEKLKKTATGWMTTINGKELKVEGQITYYNRYKRQNVVKDLSVELDRLSEESVNNDISSWTKGRSGEALSLLKKRFSHRPVQEKFVCLNCGFETHADEQAALNIARSWLFLRSQEYKKYQTNKTTGNTDKRAFVETWQSFYRKKLKEVWKPAV

SEQ ID NO: 711 - protein, 978 aa, Artificial Sequence
  CasX Variant
QEIKRINKIRRRLVKDSNTKKAGKTGPMKTLLVRVMTPDLRERLENLRKKPENIPQPISNTSRANLNKLLTDYTEMKKAILHVYWEEFQKDPVGLMSRVAQPASKKIDQNKLKPEMDEKGNLTTAGFACSQCGQPLFVYKLEQVSEKGKAYTNYFGRCNVAEHEKLILLAQLKPEKDSDEAVTYSLGKFGQRALDFYSIHVTKESTHPVKPLAQIAGNRYASGPVGKALSDACMGTIASFLSKYQDIIIEHQKVVKGNQKRLESLRELAGKENLEYPSVTLPPQPHTKEGVDAYNEVIARVRWWVNLNLWQKLKLSRDDAKPLLRLKGFPSFPLVERQANEVDWWDMVCNVKKLINEKKEDGKVFWQNLAGYKRQEALRPYLSSEEDRKKGKKFARYQLGDLLLHLEKKHGEDWGKVYDEAWERIDKKVEGLSKHIKLEEERRSEDAQSKAALTDWLRAKASFVIEGLKEADKDEFCRCELKLQKWYGDLRGKPFAIEAENSILDISGFSKQYNCAFIWQKDGVKKLNLYLIINYFKGGKLRFKKIKPEAFEANRFYTVINKKSGEIVPMEVNFNFDDPNLIILPLAFGKRQGREFIWNDLLSLETGSLKLANGRVIEKTLYNRRTRQDEPALFVALTFERREVLDSSNIKPMNLIGVDRGENIPAVIALTDPEGCPLSRFKDSLGNPTHILRIGESYKEKQRTIQAKKEVEQRRAGGYSRKYASKAKNLADDMVRNTARDLLYYAVTQDAMLIFENLSRGFGRQGKRTFMAERQYTRMEDWLTAKLAYEGLPSKTYLSKTLAQYTSKTCSNCGFTITSADYDRVLEKLKKTATGWMTTINGKELKVEGQITYYNRYKRQNVVKDLSVELDRLSEESVNNDISSWTKGRSGEALSLLKKRFSHRPVQEKFVCLNCGFETHADEQAALNIARSWLFLRSQEYKKYQTNKTTGNTDKRAFVETWQSFYRKKLKEVWKPAV

SEQ ID NO: 712 - protein, 978 aa, Artificial Sequence
  CasX Variant
QEIKRINKIRRRLVKDSNTKKAGKTGPMKTLLVRVMTPDLRERLENLRKKPENIPQPISNTSRANLNKLLTDYTEMKKAILHVYWEEFQKDPVGLMSRVAQPASKKIDQNKLKPEMDEKGNLTTAGFACSQCGQPLFVYKLEQVSEKGKAYTNYFGRCNVAEHEKLILLAQLKPEKDSDEAVTYSLGKFGQRALDFYSIHVTKESTHPVKPLAQIAGNRYASGPVGKALSDACMGTIASFLSKYQDIIIEHQKVVKGNQKRLESLRELAGKENLEYPSVTLPPQPHTKEGVDAYNEVIARVRMWVNLNLWQKLKLSRDDAKPLLRLKNFPSFPLVERQANEVDWWDMVCNVKKLINEKKEDGKVFWQNLAGYKRQEALRPYLSSEEDRKKGKKFARYQLGDLLLHLEKKHGEDWGKVYDEAWERIDKKVEGLSKHIKLEEERRSEDAQSKAALTDWLRAKASFVIEGLKEADKDEFCRCELKLQKWYGDLRGKPFAIEAENSILDISGFSKQYNCAFIWQKDGVKKLNLYLIINYFKGGKLRFKKIKPEAFEANRFYTVINKKSGEIVPMEVNFNFDDPNLIILPLAFGKRQGREFIWNDLLSLETGSLKLANGRVIEKTLYNRRTRQDEPALFVALTFERREVLDSSNIKPMNLIGVDRGENIPAVIALTDPEGCPLSRFKDSLGNPTHILRIGESYKEKQRTIQAKKEVEQRRAGGYSRKYASKAKNLADDMVRNTARDLLYYAVTQDAMLIFENLSRGFGRQGKRTFMAERQYTRMEDWLTAKLAYEGLPSKTYLSKTLAQYTSKTCSNCGFTITSADYDRVLEKLKKTATGWMTTINGKELKVEGQITYYNRYKRQNVVKDLSVELDRLSEESVNNDISSWTKGRSGEALSLLKKRFSHRPVQEKFVCLNCGFETHADEQAALNIARSWLFLRSQEYKKYQTNKTTGNTDKRAFVETWQSFYRKKLKEVWKPAV

SEQ ID NO: 713 - protein, 978 aa, Artificial Sequence
  CasX Variant
QEIKRINKIRRRLVKDSNTKKAGKTGPMKTLLVRVMTPDLRERLENLRKKPENIPQPISNTSRANLNKLLTDYTEMKKAILHVYWEEFQKDPVGLMSRVAQPASKKIDQNKLKPEMDEKGNLTTAGFACSQCGQPLFVYKLEQVSEKGKAYTNYFGRCNVAEHEKLILLAQLKPEKDSDEAVTYSLGKFGQRALDFYSIHVTKESTHPVKPLAQIAGNRYASGPVGKALSDACMGTIASFLSKYQDIIIEHQKVVKGNQKRLESLRELAGKENLEYPSVTLPPQPHTKEGVDAYNEVIARVRMWVNLNLWQKLKLSRDDAKPLLRLKGFPQFPLVERQANEVDWWDMVCNVKKLINEKKEDGKVFWQNLAGYKRQEALRPYLSSEEDRKKGKKFARYQLGDLLLHLEKKHGEDWGKVYDEAWERIDKKVEGLSKHIKLEEERRSEDAQSKAALTDWLRAKASFVIEGLKEADKDEFCRCELKLQKWYGDLRGKPFAIEAENSILDISGFSKQYNCAFIWQKDGVKKLNLYLIINYFKGGKLRFKKIKPEAFEANRFYTVINKKSGEIVPMEVNFNFDDPNLIILPLAFGKRQGREFIWNDLLSLETGSLKLANGRVIEKTLYNRRTRQDEPALFVALTFERREVLDSSNIKPMNLIGVDRGENIPAVIALTDPEGCPLSRFKDSLGNPTHILRIGESYKEKQRTIQAKKEVEQRRAGGYSRKYASKAKNLADDMVRNTARDLLYYAVTQDAMLIFENLSRGFGRQGKRTFMAERQYTRMEDWLTAKLAYEGLPSKTYLSKTLAQYTSKTCSNCGFTITSADYDRVLEKLKKTATGWMTTINGKELKVEGQITYYNRYKRQNVVKDLSVELDRLSEESVNNDISSWTKGRSGEALSLLKKRFSHRPVQEKFVCLNCGFETHADEQAALNIARSWLFLRSQEYKKYQTNKTTGNTDKRAFVETWQSFYRKKLKEVWKPAV

SEQ ID NO: 714 - protein, 979 aa, Artificial Sequence
  CasX Variant
QEIKRINKIRRRLVKDSNTKKAGKTGPMKTLLVRVMTPDLRERLENLRKKPENIPQPISNTSRANLNKLLTDYTEMKKAILHVYWEEFQKDPVGLMSRVAQPASKKIDQNKLKPEMDEKGNLTTAGFACSQCGQPLFVYKLEQVSEKGKAYTNYFGRCNVAEHEKLILLAQLKPEKDSDEAVTYSLGKFGQRALDFYSIHVTKESTHPVKPLAQIAGNRYASGPVGKALSDACMGTIASFLSKYQDIIIEHQKVVKGNQKRLESLRELAGKENLEYPSVTLPPQPHTKEGVDAYNEVIARVRMWVNLNLWQKLKLSRDDAKPLLRLKGFPSFPALVERQANEVDWWDMVCNVKKLINEKKEDGKVFWQNLAGYKRQEALRPYLSSEEDRKKGKKFARYQLGDLLLHLEKKHGEDWGKVYDEAWERIDKKVEGLSKHIKLEEERRSEDAQSKAALTDWLRAKASFVIEGLKEADKDEFCRCELKLQKWYGDLRGKPFAIEAENSILDISGFSKQYNCAFIWQKDGVKKLNLYLIINYFKGGKLRFKKIKPEAFEANRFYTVINKKSGEIVPMEVNFNFDDPNLIILPLAFGKRQGREFIWNDLLSLETGSLKLANGRVIEKTLYNRRTRQDEPALFVALTFERREVLDSSNIKPMNLIGVDRGENIPAVIALTDPEGCPLSRFKDSLGNPTHILRIGESYKEKQRTIQAKKEVEQRRAGGYSRKYASKAKNLADDMVRNTARDLLYYAVTQDAMLIFENLSRGFGRQGKRTFMAERQYTRMEDWLTAKLAYEGLPSKTYLSKTLAQYTSKTCSNCGFTITSADYDRVLEKLKKTATGWMTTINGKELKVEGQITYYNRYKRQNVVKDLSVELDRLSEESVNNDISSWTKGRSGEALSLLKKRFSHRPVQEKFVCLNCGFETHADEQAALNIARSWLFLRSQEYKKYQTNKTTGNTDKRAFVETWQSFYRKKLKEVWKPAV

SEQ ID NO: 715 - protein, 977 aa, Artificial Sequence
  CasX Variant
QEIKRINKIRRRLVKDSNTKKAGKTGPMKTLLVRVMTPDLRERLENLRKKPENIPQPISNTSRANLNKLLTDYTEMKKAILHVYWEEFQKDPVGLMSRVAQPASKKIDQNKLKPEMDEKGNLTTAGFACSQCGQPLFVYKLEQVSEKGKAYTNYFGRCNVAEHEKLILLAQLKPEKDSDEAVTYSLGKFGQRALDFYSIHVTKESTHPVKPLAQIAGNRYASGPVGKALSDACMGTIASFLSKYQDIIIEHQKVVKGNQKRLESLRELAGKENLEYPSVTLPPQPHTKEGVDAYNEVIARVRMWVNLNLWQKLKLSRDDAKPLLRLKGFPSFPLERQANEVDWWDMVCNVKKLINEKKEDGKVFWQNLAGYKRQEALRPYLSSEEDRKKGKKFARYQLGDLLLHLEKKHGEDWGKVYDEAWERIDKKVEGLSKHIKLEEERRSEDAQSKAALTDWLRAKASFVIEGLKEADKDEFCRCELKLQKWYGDLRGKPFAIEAENSILDISGFSKQYNCAFIWQKDGVKKLNLYLIINYFKGGKLRFKKIKPEAFEANRFYTVINKKSGEIVPMEVNFNFDDPNLIILPLAFGKRQGREFIWNDLLSLETGSLKLANGRVIEKTLYNRRTRQDEPALFVALTFERREVLDSSNIKPMNLIGVDRGENIPAVIALTDPEGCPLSRFKDSLGNPTHILRIGESYKEKQRTIQAKKEVEQRRAGGYSRKYASKAKNLADDMVRNTARDLLYYAVTQDAMLIFENLSRGFGRQGKRTFMAERQYTRMEDWLTAKLAYEGLPSKTYLSKTLAQYTSKTCSNCGFTITSADYDRVLEKLKKTATGWMTTINGKELKVEGQITYYNRYKRQNVVKDLSVELDRLSEESVNNDISSWTKGRSGEALSLLKKRFSHRPVQEKFVCLNCGFETHADEQAALNIARSWLFLRSQEYKKYQTNKTTGNTDKRAFVETWQSFYRKKLKEVWKPAV

SEQ ID NO: 716 - protein, 978 aa, Artificial Sequence
  CasX Variant
QEIKRINKIRRRLVKDSNTKKAGKTGPMKTLLVRVMTPDLRERLENLRKKPENIPQPISNTSRANLNKLLTDYTEMKKAILHVYWEEFQKDPVGLMSRVAQPASKKIDQNKLKPEMDEKGNLTTAGFACSQCGQPLFVYKLEQVSEKGKAYTNYFGRCNVAEHEKLILLAQLKPEKDSDEAVTYSLGKFGQRALDFYSIHVTKESTHPVKPLAQIAGNRYASGPVGKALSDACMGTIASFLSKYQDIIIEHQKVVKGNQKRLESLRELAGKENLEYPSVTLPPQPHTKEGVDAYNEVIARVRMWVNLNLWQKLKLSRDDAKPLLRLKGFPSFPLVPRQANEVDWWDMVCNVKKLINEKKEDGKVFWQNLAGYKRQEALRPYLSSEEDRKKGKKFARYQLGDLLLHLEKKHGEDWGKVYDEAWERIDKKVEGLSKHIKLEEERRSEDAQSKAALTDWLRAKASFVIEGLKEADKDEFCRCELKLQKWYGDLRGKPFAIEAENSILDISGFSKQYNCAFIWQKDGVKKLNLYLIINYFKGGKLRFKKIKPEAFEANRFYTVINKKSGEIVPMEVNFNFDDPNLIILPLAFGKRQGREFIWNDLLSLETGSLKLANGRVIEKTLYNRRTRQDEPALFVALTFERREVLDSSNIKPMNLIGVDRGENIPAVIALTDPEGCPLSRFKDSLGNPTHILRIGESYKEKQRTIQAKKEVEQRRAGGYSRKYASKAKNLADDMVRNTARDLLYYAVTQDAMLIFENLSRGFGRQGKRTFMAERQYTRMEDWLTAKLAYEGLPSKTYLSKTLAQYTSKTCSNCGFTITSADYDRVLEKLKKTATGWMTTINGKELKVEGQITYYNRYKRQNVVKDLSVELDRLSEESVNNDISSWTKGRSGEALSLLKKRFSHRPVQEKFVCLNCGFETHADEQAALNIARSWLFLRSQEYKKYQTNKTTGNTDKRAFVETWQSFYRKKLKEVWKPAV

SEQ ID NO: 717 - protein, 977 aa, Artificial Sequence
  CasX Variant
QEIKRINKIRRRLVKDSNTKKAGKTGPMKTLLVRVMTPDLRERLENLRKKPENIPQPISNTSRANLNKLLTDYTEMKKAILHVYWEEFQKDPVGLMSRVAQPASKKIDQNKLKPEMDEKGNLTTAGFACSQCGQPLFVYKLEQVSEKGKAYTNYFGRCNVAEHEKLILLAQLKPEKDSDEAVTYSLGKFGQRALDFYSIHVTKESTHPVKPLAQIAGNRYASGPVGKALSDACMGTIASFLSKYQDIIIEHQKVVKGNQKRLESLRELAGKENLEYPSVTLPPQPHTKEGVDAYNEVIARVRMWVNLNLWQKLKLSRDDAKPLLRLKGFPSFPLVRQANEVDWWDMVCNVKKLINEKKEDGKVFWQNLAGYKRQEALRPYLSSEEDRKKGKKFARYQLGDLLLHLEKKHGEDWGKVYDEAWERIDKKVEGLSKHIKLEEERRSEDAQSKAALTDWLRAKASFVIEGLKEADKDEFCRCELKLQKWYGDLRGKPFAIEAENSILDISGFSKQYNCAFIWQKDGVKKLNLYLIINYFKGGKLRFKKIKPEAFEANRFYTVINKKSGEIVPMEVNFNFDDPNLIILPLAFGKRQGREFIWNDLLSLETGSLKLANGRVIEKTLYNRRTRQDEPALFVALTFERREVLDSSNIKPMNLIGVDRGENIPAVIALTDPEGCPLSRFKDSLGNPTHILRIGESYKEKQRTIQAKKEVEQRRAGGYSRKYASKAKNLADDMVRNTARDLLYYAVTQDAMLIFENLSRGFGRQGKRTFMAERQYTRMEDWLTAKLAYEGLPSKTYLSKTLAQYTSKTCSNCGFTITSADYDRVLEKLKKTATGWMTTINGKELKVEGQITYYNRYKRQNVVKDLSVELDRLSEESVNNDISSWTKGRSGEALSLLKKRFSHRPVQEKFVCLNCGFETHADEQAALNIARSWLFLRSQEYKKYQTNKTTGNTDKRAFVETWQSFYRKKLKEVWKPAV

SEQ ID NO: 718 - protein, 978 aa, Artificial Sequence
  CasX Variant
QEIKRINKIRRRLVKDSNTKKAGKTGPMKTLLVRVMTPDLRERLENLRKKPENIPQPISNTSRANLNKLLTDYTEMKKAILHVYWEEFQKDPVGLMSRVAQPASKKIDQNKLKPEMDEKGNLTTAGFACSQCGQPLFVYKLEQVSEKGKAYTNYFGRCNVAEHEKLILLAQLKPEKDSDEAVTYSLGKFGQRALDFYSIHVTKESTHPVKPLAQIAGNRYASGPVGKALSDACMGTIASFLSKYQDIIIEHQKVVKGNQKRLESLRELAGKENLEYPSVTLPPQPHTKEGVDAYNEVIARVRMWVNLNLWQKLKLSRDDAKPLLRLKGFPSFPLVLRQANEVDWWDMVCNVKKLINEKKEDGKVFWQNLAGYKRQEALRPYLSSEEDRKKGKKFARYQLGDLLLHLEKKHGEDWGKVYDEAWERIDKKVEGLSKHIKLEEERRSEDAQSKAALTDWLRAKASFVIEGLKEADKDEFCRCELKLQKWYGDLRGKPFAIEAENSILDISGFSKQYNCAFIWQKDGVKKLNLYLIINYFKGGKLRFKKIKPEAFEANRFYTVINKKSGEIVPMEVNFNFDDPNLIILPLAFGKRQGREFIWNDLLSLETGSLKLANGRVIEKTLYNRRTRQDEPALFVALTFERREVLDSSNIKPMNLIGVDRGENIPAVIALTDPEGCPLSRFKDSLGNPTHILRIGESYKEKQRTIQAKKEVEQRRAGGYSRKYASKAKNLADDMVRNTARDLLYYAVTQDAMLIFENLSRGFGRQGKRTFMAERQYTRMEDWLTAKLAYEGLPSKTYLSKTLAQYTSKTCSNCGFTITSADYDRVLEKLKKTATGWMTTINGKELKVEGQITYYNRYKRQNVVKDLSVELDRLSEESVNNDISSWTKGRSGEALSLLKKRFSHRPVQEKFVCLNCGFETHADEQAALNIARSWLFLRSQEYKKYQTNKTTGNTDKRAFVETWQSFYRKKLKEVWKPAV

SEQ ID NO: 719 - protein, 978 aa, Artificial Sequence
  CasX Variant
QEIKRINKIRRRLVKDSNTKKAGKTGPMKTLLVRVMTPDLRERLENLRKKPENIPQPISNTSRANLNKLLTDYTEMKKAILHVYWEEFQKDPVGLMSRVAQPASKKIDQNKLKPEMDEKGNLTTAGFACSQCGQPLFVYKLEQVSEKGKAYTNYFGRCNVAEHEKLILLAQLKPEKDSDEAVTYSLGKFGQRALDFYSIHVTKESTHPVKPLAQIAGNRYASGPVGKALSDACMGTIASFLSKYQDIIIEHQKVVKGNQKRLESLRELAGKENLEYPSVTLPPQPHTKEGVDAYNEVIARVRMWVNLNLWQKLKLSRDDAKPLLRLKGFPSFPLVRRQANEVDWWDMVCNVKKLINEKKEDGKVFWQNLAGYKRQEALRPYLSSEEDRKKGKKFARYQLGDLLLHLEKKHGEDWGKVYDEAWERIDKKVEGLSKHIKLEEERRSEDAQSKAALTDWLRAKASFVIEGLKEADKDEFCRCELKLQKWYGDLRGKPFAIEAENSILDISGFSKQYNCAFIWQKDGVKKLNLYLIINYFKGGKLRFKKIKPEAFEANRFYTVINKKSGEIVPMEVNFNFDDPNLIILPLAFGKRQGREFIWNDLLSLETGSLKLANGRVIEKTLYNRRTRQDEPALFVALTFERREVLDSSNIKPMNLIGVDRGENIPAVIALTDPEGCPLSRFKDSLGNPTHILRIGESYKEKQRTIQAKKEVEQRRAGGYSRKYASKAKNLADDMVRNTARDLLYYAVTQDAMLIFENLSRGFGRQGKRTFMAERQYTRMEDWLTAKLAYEGLPSKTYLSKTLAQYTSKTCSNCGFTITSADYDRVLEKLKKTATGWMTTINGKELKVEGQITYYNRYKRQNVVKDLSVELDRLSEESVNNDISSWTKGRSGEALSLLKKRFSHRPVQEKFVCLNCGFETHADEQAALNIARSWLFLRSQEYKKYQTNKTTGNTDKRAFVETWQSFYRKKLKEVWKPAV

SEQ ID NO: 720 - protein, 979 aa, Artificial Sequence
  CasX Variant
QEIKRINKIRRRLVKDSNTKKAGKTGPMKTLLVRVMTPDLRERLENLRKKPENIPQPISNTSRANLNKLLTDYTEMKKAILHVYWEEFQKDPVGLMSRVAQPASKKIDQNKLKPEMDEKGNLTTAGFACSQCGQPLFVYKLEQVSEKGKAYTNYFGRCNVAEHEKLILLAQLKPEKDSDEAVTYSLGKFGQRALDFYSIHVTKESTHPVKPLAQIAGNRYASGPVGKALSDACMGTIASFLSKYQDIIIEHQKVVKGNQKRLESLRELAGKENLEYPSVTLPPQPHTKEGVDAYNEVIARVRMWVNLNLWQKLKLSRDDAKPLLRLKGFPSFPLVERQQANEVDWWDMVCNVKKLINEKKEDGKVFWQNLAGYKRQEALRPYLSSEEDRKKGKKFARYQLGDLLLHLEKKHGEDWGKVYDEAWERIDKKVEGLSKHIKLEEERRSEDAQSKAALTDWLRAKASFVIEGLKEADKDEFCRCELKLQKWYGDLRGKPFAIEAENSILDISGFSKQYNCAFIWQKDGVKKLNLYLIINYFKGGKLRFKKIKPEAFEANRFYTVINKKSGEIVPMEVNFNFDDPNLIILPLAFGKRQGREFIWNDLLSLETGSLKLANGRVIEKTLYNRRTRQDEPALFVALTFERREVLDSSNIKPMNLIGVDRGENIPAVIALTDPEGCPLSRFKDSLGNPTHILRIGESYKEKQRTIQAKKEVEQRRAGGYSRKYASKAKNLADDMVRNTARDLLYYAVTQDAMLIFENLSRGFGRQGKRTFMAERQYTRMEDWLTAKLAYEGLPSKTYLSKTLAQYTSKTCSNCGFTITSADYDRVLEKLKKTATGWMTTINGKELKVEGQITYYNRYKRQNVVKDLSVELDRLSEESVNNDISSWTKGRSGEALSLLKKRFSHRPVQEKFVCLNCGFETHADEQAALNIARSWLFLRSQEYKKYQTNKTTGNTDKRAFVETWQSFYRKKLKEVWKPAV

SEQ ID NO: 721 - protein, 979 aa, Artificial Sequence
  CasX Variant
QEIKRINKIRRRLVKDSNTKKAGKTGPMKTLLVRVMTPDLRERLENLRKKPENIPQPISNTSRANLNKLLTDYTEMKKAILHVYWEEFQKDPVGLMSRVAQPASKKIDQNKLKPEMDEKGNLTTAGFACSQCGQPLFVYKLEQVSEKGKAYTNYFGRCNVAEHEKLILLAQLKPEKDSDEAVTYSLGKFGQRALDFYSIHVTKESTHPVKPLAQIAGNRYASGPVGKALSDACMGTIASFLSKYQDIIIEHQKVVKGNQKRLESLRELAGKENLEYPSVTLPPQPHTKEGVDAYNEVIARVRMWVNLNLWQKLKLSRDDAKPLLRLKGFPSFPLVERQANHEVDWWDMVCNVKKLINEKKEDGKVFWQNLAGYKRQEALRPYLSSEEDRKKGKKFARYQLGDLLLHLEKKHGEDWGKVYDEAWERIDKKVEGLSKHIKLEEERRSEDAQSKAALTDWLRAKASFVIEGLKEADKDEFCRCELKLQKWYGDLRGKPFAIEAENSILDISGFSKQYNCAFIWQKDGVKKLNLYLIINYFKGGKLRFKKIKPEAFEANRFYTVINKKSGEIVPMEVNFNFDDPNLIILPLAFGKRQGREFIWNDLLSLETGSLKLANGRVIEKTLYNRRTRQDEPALFVALTFERREVLDSSNIKPMNLIGVDRGENIPAVIALTDPEGCPLSRFKDSLGNPTHILRIGESYKEKQRTIQAKKEVEQRRAGGYSRKYASKAKNLADDMVRNTARDLLYYAVTQDAMLIFENLSRGFGRQGKRTFMAERQYTRMEDWLTAKLAYEGLPSKTYLSKTLAQYTSKTCSNCGFTITSADYDRVLEKLKKTATGWMTTINGKELKVEGQITYYNRYKRQNVVKDLSVELDRLSEESVNNDISSWTKGRSGEALSLLKKRFSHRPVQEKFVCLNCGFETHADEQAALNIARSWLFLRSQEYKKYQTNKTTGNTDKRAFVETWQSFYRKKLKEVWKPAV

SEQ ID NO: 722 - protein, 979 aa, Artificial Sequence
  CasX Variant
QEIKRINKIRRRLVKDSNTKKAGKTGPMKTLLVRVMTPDLRERLENLRKKPENIPQPISNTSRANLNKLLTDYTEMKKAILHVYWEEFQKDPVGLMSRVAQPASKKIDQNKLKPEMDEKGNLTTAGFACSQCGQPLFVYKLEQVSEKGKAYTNYFGRCNVAEHEKLILLAQLKPEKDSDEAVTYSLGKFGQRALDFYSIHVTKESTHPVKPLAQIAGNRYASGPVGKALSDACMGTIASFLSKYQDIIIEHQKVVKGNQKRLESLRELAGKENLEYPSVTLPPQPHTKEGVDAYNEVIARVRMWVNLNLWQKLKLSRDDAKPLLRLKGFPSFPLVERQANAEVDWWDMVCNVKKLINEKKEDGKVFWQNLAGYKRQEALRPYLSSEEDRKKGKKFARYQLGDLLLHLEKKHGEDWGKVYDEAWERIDKKVEGLSKHIKLEEERRSEDAQSKAALTDWLRAKASFVIEGLKEADKDEFCRCELKLQKWYGDLRGKPFAIEAENSILDISGFSKQYNCAFIWQKDGVKKLNLYLIINYFKGGKLRFKKIKPEAFEANRFYTVINKKSGEIVPMEVNFNFDDPNLIILPLAFGKRQGREFIWNDLLSLETGSLKLANGRVIEKTLYNRRTRQDEPALFVALTFERREVLDSSNIKPMNLIGVDRGENIPAVIALTDPEGCPLSRFKDSLGNPTHILRIGESYKEKQRTIQAKKEVEQRRAGGYSRKYASKAKNLADDMVRNTARDLLYYAVTQDAMLIFENLSRGFGRQGKRTFMAERQYTRMEDWLTAKLAYEGLPSKTYLSKTLAQYTSKTCSNCGFTITSADYDRVLEKLKKTATGWMTTINGKELKVEGQITYYNRYKRQNVVKDLSVELDRLSEESVNNDISSWTKGRSGEALSLLKKRFSHRPVQEKFVCLNCGFETHADEQAALNIARSWLFLRSQEYKKYQTNKTTGNTDKRAFVETWQSFYRKKLKEVWKPAV

SEQ ID NO: 723 - protein, 979 aa, Artificial Sequence
  CasX Variant
QEIKRINKIRRRLVKDSNTKKAGKTGPMKTLLVRVMTPDLRERLENLRKKPENIPQPISNTSRANLNKLLTDYTEMKKAILHVYWEEFQKDPVGLMSRVAQPASKKIDQNKLKPEMDEKGNLTTAGFACSQCGQPLFVYKLEQVSEKGKAYTNYFGRCNVAEHEKLILLAQLKPEKDSDEAVTYSLGKFGQRALDFYSIHVTKESTHPVKPLAQIAGNRYASGPVGKALSDACMGTIASFLSKYQDIIIEHQKVVKGNQKRLESLRELAGKENLEYPSVTLPPQPHTKEGVDAYNEVIARVRMWVNLNLWQKLKLSRDDAKPLLRLKGFPSFPLVERQANEVDDWWDMVCNVKKLINEKKEDGKVFWQNLAGYKRQEALRPYLSSEEDRKKGKKFARYQLGDLLLHLEKKHGEDWGKVYDEAWERIDKKVEGLSKHIKLEEERRSEDAQSKAALTDWLRAKASFVIEGLKEADKDEFCRCELKLQKWYGDLRGKPFAIEAENSILDISGFSKQYNCAFIWQKDGVKKLNLYLIINYFKGGKLRFKKIKPEAFEANRFYTVINKKSGEIVPMEVNFNFDDPNLIILPLAFGKRQGREFIWNDLLSLETGSLKLANGRVIEKTLYNRRTRQDEPALFVALTFERREVLDSSNIKPMNLIGVDRGENIPAVIALTDPEGCPLSRFKDSLGNPTHILRIGESYKEKQRTIQAKKEVEQRRAGGYSRKYASKAKNLADDMVRNTARDLLYYAVTQDAMLIFENLSRGFGRQGKRTFMAERQYTRMEDWLTAKLAYEGLPSKTYLSKTLAQYTSKTCSNCGFTITSADYDRVLEKLKKTATGWMTTINGKELKVEGQITYYNRYKRQNVVKDLSVELDRLSEESVNNDISSWTKGRSGEALSLLKKRFSHRPVQEKFVCLNCGFETHADEQAALNIARSWLFLRSQEYKKYQTNKTTGNTDKRAFVETWQSFYRKKLKEVWKPAV

SEQ ID NO: 724 - protein, 979 aa, Artificial Sequence
  CasX Variant
QEIKRINKIRRRLVKDSNTKKAGKTGPMKTLLVRVMTPDLRERLENLRKKPENIPQPISNTSRANLNKLLTDYTEMKKAILHVYWEEFQKDPVGLMSRVAQPASKKIDQNKLKPEMDEKGNLTTAGFACSQCGQPLFVYKLEQVSEKGKAYTNYFGRCNVAEHEKLILLAQLKPEKDSDEAVTYSLGKFGQRALDFYSIHVTKESTHPVKPLAQIAGNRYASGPVGKALSDACMGTIASFLSKYQDIIIEHQKVVKGNQKRLESLRELAGKENLEYPSVTLPPQPHTKEGVDAYNEVIARVRMWVNLNLWQKLKLSRDDAKPLLRLKGFPSFPLVERQANEVDWWPDMVCNVKKLINEKKEDGKVFWQNLAGYKRQEALRPYLSSEEDRKKGKKFARYQLGDLLLHLEKKHGEDWGKVYDEAWERIDKKVEGLSKHIKLEEERRSEDAQSKAALTDWLRAKASFVIEGLKEADKDEFCRCELKLQKWYGDLRGKPFAIEAENSILDISGFSKQYNCAFIWQKDGVKKLNLYLIINYFKGGKLRFKKIKPEAFEANRFYTVINKKSGEIVPMEVNFNFDDPNLIILPLAFGKRQGREFIWNDLLSLETGSLKLANGRVIEKTLYNRRTRQDEPALFVALTFERREVLDSSNIKPMNLIGVDRGENIPAVIALTDPEGCPLSRFKDSLGNPTHILRIGESYKEKQRTIQAKKEVEQRRAGGYSRKYASKAKNLADDMVRNTARDLLYYAVTQDAMLIFENLSRGFGRQGKRTFMAERQYTRMEDWLTAKLAYEGLPSKTYLSKTLAQYTSKTCSNCGFTITSADYDRVLEKLKKTATGWMTTINGKELKVEGQITYYNRYKRQNVVKDLSVELDRLSEESVNNDISSWTKGRSGEALSLLKKRFSHRPVQEKFVCLNCGFETHADEQAALNIARSWLFLRSQEYKKYQTNKTTGNTDKRAFVETWQSFYRKKLKEVWKPAV

SEQ ID NO: 725 - protein, 978 aa, Artificial Sequence
  CasX Variant
QEIKRINKIRRRLVKDSNTKKAGKTGPMKTLLVRVMTPDLRERLENLRKKPENIPQPISNTSRANLNKLLTDYTEMKKAILHVYWEEFQKDPVGLMSRVAQPASKKIDQNKLKPEMDEKGNLTTAGFACSQCGQPLFVYKLEQVSEKGKAYTNYFGRCNVAEHEKLILLAQLKPEKDSDEAVTYSLGKFGQRALDFYSIHVTKESTHPVKPLAQIAGNRYASGPVGKALSDACMGTIASFLSKYQDIIIEHQKVVKGNQKRLESLRELAGKENLEYPSVTLPPQPHTKEGVDAYNEVIARVRMWVNLNLWQKLKLSRDDAKPLLRLKGFPSFPLVERQANEVDWWDMVCNVKKLINEKKEDGKVFWQNLAGYKRQEALRPYLSSEEDRKKGKKFARTQLGDLLLHLEKKHGEDWGKVYDEAWERIDKKVEGLSKHIKLEEERRSEDAQSKAALTDWLRAKASFVIEGLKEADKDEFCRCELKLQKWYGDLRGKPFAIEAENSILDISGFSKQYNCAFIWQKDGVKKLNLYLIINYFKGGKLRFKKIKPEAFEANRFYTVINKKSGEIVPMEVNFNFDDPNLIILPLAFGKRQGREFIWNDLLSLETGSLKLANGRVIEKTLYNRRTRQDEPALFVALTFERREVLDSSNIKPMNLIGVDRGENIPAVIALTDPEGCPLSRFKDSLGNPTHILRIGESYKEKQRTIQAKKEVEQRRAGGYSRKYASKAKNLADDMVRNTARDLLYYAVTQDAMLIFENLSRGFGRQGKRTFMAERQYTRMEDWLTAKLAYEGLPSKTYLSKTLAQYTSKTCSNCGFTITSADYDRVLEKLKKTATGWMTTINGKELKVEGQITYYNRYKRQNVVKDLSVELDRLSEESVNNDISSWTKGRSGEALSLLKKRFSHRPVQEKFVCLNCGFETHADEQAALNIARSWLFLRSQEYKKYQTNKTTGNTDKRAFVETWQSFYRKKLKEVWKPAV

SEQ ID NO: 726 - protein, 978 aa, Artificial Sequence
  CasX Variant
QEIKRINKIRRRLVKDSNTKKAGKTGPMKTLLVRVMTPDLRERLENLRKKPENIPQPISNTSRANLNKLLTDYTEMKKAILHVYWEEFQKDPVGLMSRVAQPASKKIDQNKLKPEMDEKGNLTTAGFACSQCGQPLFVYKLEQVSEKGKAYTNYFGRCNVAEHEKLILLAQLKPEKDSDEAVTYSLGKFGQRALDFYSIHVTKESTHPVKPLAQIAGNRYASGPVGKALSDACMGTIASFLSKYQDIIIEHQKVVKGNQKRLESLRELAGKENLEYPSVTLPPQPHTKEGVDAYNEVIARVRMWVNLNLWQKLKLSRDDAKPLLRLKGFPSFPLVERQANEVDWWDMVCNVKKLINEKKEDGKVFWQNLAGYKRQEALRPYLSSEEDRKKGKKFARYQLMDLLLHLEKKHGEDWGKVYDEAWERIDKKVEGLSKHIKLEEERRSEDAQSKAALTDWLRAKASFVIEGLKEADKDEFCRCELKLQKWYGDLRGKPFAIEAENSILDISGFSKQYNCAFIWQKDGVKKLNLYLIINYFKGGKLRFKKIKPEAFEANRFYTVINKKSGEIVPMEVNFNFDDPNLIILPLAFGKRQGREFIWNDLLSLETGSLKLANGRVIEKTLYNRRTRQDEPALFVALTFERREVLDSSNIKPMNLIGVDRGENIPAVIALTDPEGCPLSRFKDSLGNPTHILRIGESYKEKQRTIQAKKEVEQRRAGGYSRKYASKAKNLADDMVRNTARDLLYYAVTQDAMLIFENLSRGFGRQGKRTFMAERQYTRMEDWLTAKLAYEGLPSKTYLSKTLAQYTSKTCSNCGFTITSADYDRVLEKLKKTATGWMTTINGKELKVEGQITYYNRYKRQNVVKDLSVELDRLSEESVNNDISSWTKGRSGEALSLLKKRFSHRPVQEKFVCLNCGFETHADEQAALNIARSWLFLRSQEYKKYQTNKTTGNTDKRAFVETWQSFYRKKLKEVWKPAV

SEQ ID NO: 727 - protein, 978 aa, Artificial Sequence
  CasX Variant
QEIKRINKIRRRLVKDSNTKKAGKTGPMKTLLVRVMTPDLRERLENLRKKPENIPQPISNTSRANLNKLLTDYTEMKKAILHVYWEEFQKDPVGLMSRVAQPASKKIDQNKLKPEMDEKGNLTTAGFACSQCGQPLFVYKLEQVSEKGKAYTNYFGRCNVAEHEKLILLAQLKPEKDSDEAVTYSLGKFGQRALDFYSIHVTKESTHPVKPLAQIAGNRYASGPVGKALSDACMGTIASFLSKYQDIIIEHQKVVKGNQKRLESLRELAGKENLEYPSVTLPPQPHTKEGVDAYNEVIARVRMWVNLNLWQKLKLSRDDAKPLLRLKGFPSFPLVERQANEVDWWDMVCNVKKLINEKKEDGKVFWQNLAGYKRQEALRPYLSSEEDRKKGKKFARYQLGDLLNHLEKKHGEDWGKVYDEAWERIDKKVEGLSKHIKLEEERRSEDAQSKAALTDWLRAKASFVIEGLKEADKDEFCRCELKLQKWYGDLRGKPFAIEAENSILDISGFSKQYNCAFIWQKDGVKKLNLYLIINYFKGGKLRFKKIKPEAFEANRFYTVINKKSGEIVPMEVNFNFDDPNLIILPLAFGKRQGREFIWNDLLSLETGSLKLANGRVIEKTLYNRRTRQDEPALFVALTFERREVLDSSNIKPMNLIGVDRGENIPAVIALTDPEGCPLSRFKDSLGNPTHILRIGESYKEKQRTIQAKKEVEQRRAGGYSRKYASKAKNLADDMVRNTARDLLYYAVTQDAMLIFENLSRGFGRQGKRTFMAERQYTRMEDWLTAKLAYEGLPSKTYLSKTLAQYTSKTCSNCGFTITSADYDRVLEKLKKTATGWMTTINGKELKVEGQITYYNRYKRQNVVKDLSVELDRLSEESVNNDISSWTKGRSGEALSLLKKRFSHRPVQEKFVCLNCGFETHADEQAALNIARSWLFLRSQEYKKYQTNKTTGNTDKRAFVETWQSFYRKKLKEVWKPAV

SEQ ID NO: 728 - protein, 978 aa, Artificial Sequence
  CasX Variant
QEIKRINKIRRRLVKDSNTKKAGKTGPMKTLLVRVMTPDLRERLENLRKKPENIPQPISNTSRANLNKLLTDYTEMKKAILHVYWEEFQKDPVGLMSRVAQPASKKIDQNKLKPEMDEKGNLTTAGFACSQCGQPLFVYKLEQVSEKGKAYTNYFGRCNVAEHEKLILLAQLKPEKDSDEAVTYSLGKFGQRALDFYSIHVTKESTHPVKPLAQIAGNRYASGPVGKALSDACMGTIASFLSKYQDIIIEHQKVVKGNQKRLESLRELAGKENLEYPSVTLPPQPHTKEGVDAYNEVIARVRMWVNLNLWQKLKLSRDDAKPLLRLKGFPSFPLVERQANEVDWWDMVCNVKKLINEKKEDGKVFWQNLAGYKRQEALRPYLSSEEDRKKGKKFARYQLGDLLWHLEKKHGEDWGKVYDEAWERIDKKVEGLSKHIKLEEERRSEDAQSKAALTDWLRAKASFVIEGLKEADKDEFCRCELKLQKWYGDLRGKPFAIEAENSILDISGFSKQYNCAFIWQKDGVKKLNLYLIINYFKGGKLRFKKIKPEAFEANRFYTVINKKSGEIVPMEVNFNFDDPNLIILPLAFGKRQGREFIWNDLLSLETGSLKLANGRVIEKTLYNRRTRQDEPALFVALTFERREVLDSSNIKPMNLIGVDRGENIPAVIALTDPEGCPLSRFKDSLGNPTHILRIGESYKEKQRTIQAKKEVEQRRAGGYSRKYASKAKNLADDMVRNTARDLLYYAVTQDAMLIFENLSRGFGRQGKRTFMAERQYTRMEDWLTAKLAYEGLPSKTYLSKTLAQYTSKTCSNCGFTITSADYDRVLEKLKKTATGWMTTINGKELKVEGQITYYNRYKRQNVVKDLSVELDRLSEESVNNDISSWTKGRSGEALSLLKKRFSHRPVQEKFVCLNCGFETHADEQAALNIARSWLFLRSQEYKKYQTNKTTGNTDKRAFVETWQSFYRKKLKEVWKPAV

SEQ ID NO: 729 - protein, 978 aa, Artificial Sequence
  CasX Variant
QEIKRINKIRRRLVKDSNTKKAGKTGPMKTLLVRVMTPDLRERLENLRKKPENIPQPISNTSRANLNKLLTDYTEMKKAILHVYWEEFQKDPVGLMSRVAQPASKKIDQNKLKPEMDEKGNLTTAGFACSQCGQPLFVYKLEQVSEKGKAYTNYFGRCNVAEHEKLILLAQLKPEKDSDEAVTYSLGKFGQRALDFYSIHVTKESTHPVKPLAQIAGNRYASGPVGKALSDACMGTIASFLSKYQDIIIEHQKVVKGNQKRLESLRELAGKENLEYPSVTLPPQPHTKEGVDAYNEVIARVRMWVNLNLWQKLKLSRDDAKPLLRLKGFPSFPLVERQANEVDWWDMVCNVKKLINEKKEDGKVFWQNLAGYKRQEALRPYLSSEEDRKKGKKFARYQLGDLLLHLYKKHGEDWGKVYDEAWERIDKKVEGLSKHIKLEEERRSEDAQSKAALTDWLRAKASFVIEGLKEADKDEFCRCELKLQKWYGDLRGKPFAIEAENSILDISGFSKQYNCAFIWQKDGVKKLNLYLIINYFKGGKLRFKKIKPEAFEANRFYTVINKKSGEIVPMEVNFNFDDPNLIILPLAFGKRQGREFIWNDLLSLETGSLKLANGRVIEKTLYNRRTRQDEPALFVALTFERREVLDSSNIKPMNLIGVDRGENIPAVIALTDPEGCPLSRFKDSLGNPTHILRIGESYKEKQRTIQAKKEVEQRRAGGYSRKYASKAKNLADDMVRNTARDLLYYAVTQDAMLIFENLSRGFGRQGKRTFMAERQYTRMEDWLTAKLAYEGLPSKTYLSKTLAQYTSKTCSNCGFTITSADYDRVLEKLKKTATGWMTTINGKELKVEGQITYYNRYKRQNVVKDLSVELDRLSEESVNNDISSWTKGRSGEALSLLKKRFSHRPVQEKFVCLNCGFETHADEQAALNIARSWLFLRSQEYKKYQTNKTTGNTDKRAFVETWQSFYRKKLKEVWKPAV

SEQ ID NO: 730 - protein, 978 aa, Artificial Sequence
  CasX Variant
QEIKRINKIRRRLVKDSNTKKAGKTGPMKTLLVRVMTPDLRERLENLRKKPENIPQPISNTSRANLNKLLTDYTEMKKAILHVYWEEFQKDPVGLMSRVAQPASKKIDQNKLKPEMDEKGNLTTAGFACSQCGQPLFVYKLEQVSEKGKAYTNYFGRCNVAEHEKLILLAQLKPEKDSDEAVTYSLGKFGQRALDFYSIHVTKESTHPVKPLAQIAGNRYASGPVGKALSDACMGTIASFLSKYQDIIIEHQKVVKGNQKRLESLRELAGKENLEYPSVTLPPQPHTKEGVDAYNEVIARVRMWVNLNLWQKLKLSRDDAKPLLRLKGFPSFPLVERQANEVDWWDMVCNVKKLINEKKEDGKVFWQNLAGYKRQEALRPYLSSEEDRKKGKKFARYQLGDLLLHLEKKHPEDWGKVYDEAWERIDKKVEGLSKHIKLEEERRSEDAQSKAALTDWLRAKASFVIEGLKEADKDEFCRCELKLQKWYGDLRGKPFAIEAENSILDISGFSKQYNCAFIWQKDGVKKLNLYLIINYFKGGKLRFKKIKPEAFEANRFYTVINKKSGEIVPMEVNFNFDDPNLIILPLAFGKRQGREFIWNDLLSLETGSLKLANGRVIEKTLYNRRTRQDEPALFVALTFERREVLDSSNIKPMNLIGVDRGENIPAVIALTDPEGCPLSRFKDSLGNPTHILRIGESYKEKQRTIQAKKEVEQRRAGGYSRKYASKAKNLADDMVRNTARDLLYYAVTQDAMLIFENLSRGFGRQGKRTFMAERQYTRMEDWLTAKLAYEGLPSKTYLSKTLAQYTSKTCSNCGFTITSADYDRVLEKLKKTATGWMTTINGKELKVEGQITYYNRYKRQNVVKDLSVELDRLSEESVNNDISSWTKGRSGEALSLLKKRFSHRPVQEKFVCLNCGFETHADEQAALNIARSWLFLRSQEYKKYQTNKTTGNTDKRAFVETWQSFYRKKLKEVWKPAV

SEQ ID NO: 731 - protein, 979 aa, Artificial Sequence
  CasX Variant
QEIKRINKIRRRLVKDSNTKKAGKTGPMKTLLVRVMTPDLRERLENLRKKPENIPQPISNTSRANLNKLLTDYTEMKKAILHVYWEEFQKDPVGLMSRVAQPASKKIDQNKLKPEMDEKGNLTTAGFACSQCGQPLFVYKLEQVSEKGKAYTNYFGRCNVAEHEKLILLAQLKPEKDSDEAVTYSLGKFGQRALDFYSIHVTKESTHPVKPLAQIAGNRYASGPVGKALSDACMGTIASFLSKYQDIIIEHQKVVKGNQKRLESLRELAGKENLEYPSVTLPPQPHTKEGVDAYNEVIARVRMWVNLNLWQKLKLSRDDAKPLLRLKGFPSFPLVERQANEVDWWDMVCNVKKLINEKKEDGKVFWQNLAGYKRQEALRPYLSSEEDRKKGKKFARYQLGDLLLHLEKKHEGEDWGKVYDEAWERIDKKVEGLSKHIKLEEERRSEDAQSKAALTDWLRAKASFVIEGLKEADKDEFCRCELKLQKWYGDLRGKPFAIEAENSILDISGFSKQYNCAFIWQKDGVKKLNLYLIINYFKGGKLRFKKIKPEAFEANRFYTVINKKSGEIVPMEVNFNFDDPNLIILPLAFGKRQGREFIWNDLLSLETGSLKLANGRVIEKTLYNRRTRQDEPALFVALTFERREVLDSSNIKPMNLIGVDRGENIPAVIALTDPEGCPLSRFKDSLGNPTHILRIGESYKEKQRTIQAKKEVEQRRAGGYSRKYASKAKNLADDMVRNTARDLLYYAVTQDAMLIFENLSRGFGRQGKRTFMAERQYTRMEDWLTAKLAYEGLPSKTYLSKTLAQYTSKTCSNCGFTITSADYDRVLEKLKKTATGWMTTINGKELKVEGQITYYNRYKRQNVVKDLSVELDRLSEESVNNDISSWTKGRSGEALSLLKKRFSHRPVQEKFVCLNCGFETHADEQAALNIARSWLFLRSQEYKKYQTNKTTGNTDKRAFVETWQSFYRKKLKEVWKPAV

SEQ ID NO: 732 - protein, 979 aa, Artificial Sequence
  CasX Variant
QEIKRINKIRRRLVKDSNTKKAGKTGPMKTLLVRVMTPDLRERLENLRKKPENIPQPISNTSRANLNKLLTDYTEMKKAILHVYWEEFQKDPVGLMSRVAQPASKKIDQNKLKPEMDEKGNLTTAGFACSQCGQPLFVYKLEQVSEKGKAYTNYFGRCNVAEHEKLILLAQLKPEKDSDEAVTYSLGKFGQRALDFYSIHVTKESTHPVKPLAQIAGNRYASGPVGKALSDACMGTIASFLSKYQDIIIEHQKVVKGNQKRLESLRELAGKENLEYPSVTLPPQPHTKEGVDAYNEVIARVRMWVNLNLWQKLKLSRDDAKPLLRLKGFPSFPLVERQANEVDWWDMVCNVKKLINEKKEDGKVFWQNLAGYKRQEALRPYLSSEEDRKKGKKFARYQLGDLLLHLEKKHGERDWGKVYDEAWERIDKKVEGLSKHIKLEEERRSEDAQSKAALTDWLRAKASFVIEGLKEADKDEFCRCELKLQKWYGDLRGKPFAIEAENSILDISGFSKQYNCAFIWQKDGVKKLNLYLIINYFKGGKLRFKKIKPEAFEANRFYTVINKKSGEIVPMEVNFNFDDPNLIILPLAFGKRQGREFIWNDLLSLETGSLKLANGRVIEKTLYNRRTRQDEPALFVALTFERREVLDSSNIKPMNLIGVDRGENIPAVIALTDPEGCPLSRFKDSLGNPTHILRIGESYKEKQRTIQAKKEVEQRRAGGYSRKYASKAKNLADDMVRNTARDLLYYAVTQDAMLIFENLSRGFGRQGKRTFMAERQYTRMEDWLTAKLAYEGLPSKTYLSKTLAQYTSKTCSNCGFTITSADYDRVLEKLKKTATGWMTTINGKELKVEGQITYYNRYKRQNVVKDLSVELDRLSEESVNNDISSWTKGRSGEALSLLKKRFSHRPVQEKFVCLNCGFETHADEQAALNIARSWLFLRSQEYKKYQTNKTTGNTDKRAFVETWQSFYRKKLKEVWKPAV

SEQ ID NO: 733 - protein, 979 aa, Artificial Sequence
  CasX Variant
QEIKRINKIRRRLVKDSNTKKAGKTGPMKTLLVRVMTPDLRERLENLRKKPENIPQPISNTSRANLNKLLTDYTEMKKAILHVYWEEFQKDPVGLMSRVAQPASKKIDQNKLKPEMDEKGNLTTAGFACSQCGQPLFVYKLEQVSEKGKAYTNYFGRCNVAEHEKLILLAQLKPEKDSDEAVTYSLGKFGQRALDFYSIHVTKESTHPVKPLAQIAGNRYASGPVGKALSDACMGTIASFLSKYQDIIIEHQKVVKGNQKRLESLRELAGKENLEYPSVTLPPQPHTKEGVDAYNEVIARVRMWVNLNLWQKLKLSRDDAKPLLRLKGFPSFPLVERQANEVDWWDMVCNVKKLINEKKEDGKVFWQNLAGYKRQEALRPYLSSEEDRKKGKKFARYQLGDLLLHLEKKHGEWDWGKVYDEAWERIDKKVEGLSKHIKLEEERRSEDAQSKAALTDWLRAKASFVIEGLKEADKDEFCRCELKLQKWYGDLRGKPFAIEAENSILDISGFSKQYNCAFIWQKDGVKKLNLYLIINYFKGGKLRFKKIKPEAFEANRFYTVINKKSGEIVPMEVNFNFDDPNLIILPLAFGKRQGREFIWNDLLSLETGSLKLANGRVIEKTLYNRRTRQDEPALFVALTFERREVLDSSNIKPMNLIGVDRGENIPAVIALTDPEGCPLSRFKDSLGNPTHILRIGESYKEKQRTIQAKKEVEQRRAGGYSRKYASKAKNLADDMVRNTARDLLYYAVTQDAMLIFENLSRGFGRQGKRTFMAERQYTRMEDWLTAKLAYEGLPSKTYLSKTLAQYTSKTCSNCGFTITSADYDRVLEKLKKTATGWMTTINGKELKVEGQITYYNRYKRQNVVKDLSVELDRLSEESVNNDISSWTKGRSGEALSLLKKRFSHRPVQEKFVCLNCGFETHADEQAALNIARSWLFLRSQEYKKYQTNKTTGNTDKRAFVETWQSFYRKKLKEVWKPAV

SEQ ID NO: 734 - protein, 979 aa, Artificial Sequence
  CasX Variant
QEIKRINKIRRRLVKDSNTKKAGKTGPMKTLLVRVMTPDLRERLENLRKKPENIPQPISNTSRANLNKLLTDYTEMKKAILHVYWEEFQKDPVGLMSRVAQPASKKIDQNKLKPEMDEKGNLTTAGFACSQCGQPLFVYKLEQVSEKGKAYTNYFGRCNVAEHEKLILLAQLKPEKDSDEAVTYSLGKFGQRALDFYSIHVTKESTHPVKPLAQIAGNRYASGPVGKALSDACMGTIASFLSKYQDIIIEHQKVVKGNQKRLESLRELAGKENLEYPSVTLPPQPHTKEGVDAYNEVIARVRMWVNLNLWQKLKLSRDDAKPLLRLKGFPSFPLVERQANEVDWWDMVCNVKKLINEKKEDGKVFWQNLAGYKRQEALRPYLSSEEDRKKGKKFARYQLGDLLLHLEKKHGEYDWGKVYDEAWERIDKKVEGLSKHIKLEEERRSEDAQSKAALTDWLRAKASFVIEGLKEADKDEFCRCELKLQKWYGDLRGKPFAIEAENSILDISGFSKQYNCAFIWQKDGVKKLNLYLIINYFKGGKLRFKKIKPEAFEANRFYTVINKKSGEIVPMEVNFNFDDPNLIILPLAFGKRQGREFIWNDLLSLETGSLKLANGRVIEKTLYNRRTRQDEPALFVALTFERREVLDSSNIKPMNLIGVDRGENIPAVIALTDPEGCPLSRFKDSLGNPTHILRIGESYKEKQRTIQAKKEVEQRRAGGYSRKYASKAKNLADDMVRNTARDLLYYAVTQDAMLIFENLSRGFGRQGKRTFMAERQYTRMEDWLTAKLAYEGLPSKTYLSKTLAQYTSKTCSNCGFTITSADYDRVLEKLKKTATGWMTTINGKELKVEGQITYYNRYKRQNVVKDLSVELDRLSEESVNNDISSWTKGRSGEALSLLKKRFSHRPVQEKFVCLNCGFETHADEQAALNIARSWLFLRSQEYKKYQTNKTTGNTDKRAFVETWQSFYRKKLKEVWKPAV

SEQ ID NO: 735 - protein, 979 aa, Artificial Sequence
  CasX Variant
QEIKRINKIRRRLVKDSNTKKAGKTGPMKTLLVRVMTPDLRERLENLRKKPENIPQPISNTSRANLNKLLTDYTEMKKAILHVYWEEFQKDPVGLMSRVAQPASKKIDQNKLKPEMDEKGNLTTAGFACSQCGQPLFVYKLEQVSEKGKAYTNYFGRCNVAEHEKLILLAQLKPEKDSDEAVTYSLGKFGQRALDFYSIHVTKESTHPVKPLAQIAGNRYASGPVGKALSDACMGTIASFLSKYQDIIIEHQKVVKGNQKRLESLRELAGKENLEYPSVTLPPQPHTKEGVDAYNEVIARVRMWVNLNLWQKLKLSRDDAKPLLRLKGFPSFPLVERQANEVDWWDMVCNVKKLINEKKEDGKVFWQNLAGYKRQEALRPYLSSEEDRKKGKKFARYQLGDLLLHLEKKHGEDYWGKVYDEAWERIDKKVEGLSKHIKLEEERRSEDAQSKAALTDWLRAKASFVIEGLKEADKDEFCRCELKLQKWYGDLRGKPFAIEAENSILDISGFSKQYNCAFIWQKDGVKKLNLYLIINYFKGGKLRFKKIKPEAFEANRFYTVINKKSGEIVPMEVNFNFDDPNLIILPLAFGKRQGREFIWNDLLSLETGSLKLANGRVIEKTLYNRRTRQDEPALFVALTFERREVLDSSNIKPMNLIGVDRGENIPAVIALTDPEGCPLSRFKDSLGNPTHILRIGESYKEKQRTIQAKKEVEQRRAGGYSRKYASKAKNLADDMVRNTARDLLYYAVTQDAMLIFENLSRGFGRQGKRTFMAERQYTRMEDWLTAKLAYEGLPSKTYLSKTLAQYTSKTCSNCGFTITSADYDRVLEKLKKTATGWMTTINGKELKVEGQITYYNRYKRQNVVKDLSVELDRLSEESVNNDISSWTKGRSGEALSLLKKRFSHRPVQEKFVCLNCGFETHADEQAALNIARSWLFLRSQEYKKYQTNKTTGNTDKRAFVETWQSFYRKKLKEVWKPAV

SEQ ID NO: 736 - protein, 978 aa, Artificial Sequence
  CasX Variant
QEIKRINKIRRRLVKDSNTKKAGKTGPMKTLLVRVMTPDLRERLENLRKKPENIPQPISNTSRANLNKLLTDYTEMKKAILHVYWEEFQKDPVGLMSRVAQPASKKIDQNKLKPEMDEKGNLTTAGFACSQCGQPLFVYKLEQVSEKGKAYTNYFGRCNVAEHEKLILLAQLKPEKDSDEAVTYSLGKFGQRALDFYSIHVTKESTHPVKPLAQIAGNRYASGPVGKALSDACMGTIASFLSKYQDIIIEHQKVVKGNQKRLESLRELAGKENLEYPSVTLPPQPHTKEGVDAYNEVIARVRMWVNLNLWQKLKLSRDDAKPLLRLKGFPSFPLVERQANEVDWWDMVCNVKKLINEKKEDGKVFWQNLAGYKRQEALRPYLSSEEDRKKGKKFARYQLGDLLLHLEKKHGEDRGKVYDEAWERIDKKVEGLSKHIKLEEERRSEDAQSKAALTDWLRAKASFVIEGLKEADKDEFCRCELKLQKWYGDLRGKPFAIEAENSILDISGFSKQYNCAFIWQKDGVKKLNLYLIINYFKGGKLRFKKIKPEAFEANRFYTVINKKSGEIVPMEVNFNFDDPNLIILPLAFGKRQGREFIWNDLLSLETGSLKLANGRVIEKTLYNRRTRQDEPALFVALTFERREVLDSSNIKPMNLIGVDRGENIPAVIALTDPEGCPLSRFKDSLGNPTHILRIGESYKEKQRTIQAKKEVEQRRAGGYSRKYASKAKNLADDMVRNTARDLLYYAVTQDAMLIFENLSRGFGRQGKRTFMAERQYTRMEDWLTAKLAYEGLPSKTYLSKTLAQYTSKTCSNCGFTITSADYDRVLEKLKKTATGWMTTINGKELKVEGQITYYNRYKRQNVVKDLSVELDRLSEESVNNDISSWTKGRSGEALSLLKKRFSHRPVQEKFVCLNCGFETHADEQAALNIARSWLFLRSQEYKKYQTNKTTGNTDKRAFVETWQSFYRKKLKEVWKPAV

SEQ ID NO: 737 - protein, 978 aa, Artificial Sequence
  CasX Variant
QEIKRINKIRRRLVKDSNTKKAGKTGPMKTLLVRVMTPDLRERLENLRKKPENIPQPISNTSRANLNKLLTDYTEMKKAILHVYWEEFQKDPVGLMSRVAQPASKKIDQNKLKPEMDEKGNLTTAGFACSQCGQPLFVYKLEQVSEKGKAYTNYFGRCNVAEHEKLILLAQLKPEKDSDEAVTYSLGKFGQRALDFYSIHVTKESTHPVKPLAQIAGNRYASGPVGKALSDACMGTIASFLSKYQDIIIEHQKVVKGNQKRLESLRELAGKENLEYPSVTLPPQPHTKEGVDAYNEVIARVRMWVNLNLWQKLKLSRDDAKPLLRLKGFPSFPLVERQANEVDWWDMVCNVKKLINEKKEDGKVFWQNLAGYKRQEALRPYLSSEEDRKKGKKFARYQLGDLLLHLEKKHGEDWGDVYDEAWERIDKKVEGLSKHIKLEEERRSEDAQSKAALTDWLRAKASFVIEGLKEADKDEFCRCELKLQKWYGDLRGKPFAIEAENSILDISGFSKQYNCAFIWQKDGVKKLNLYLIINYFKGGKLRFKKIKPEAFEANRFYTVINKKSGEIVPMEVNFNFDDPNLIILPLAFGKRQGREFIWNDLLSLETGSLKLANGRVIEKTLYNRRTRQDEPALFVALTFERREVLDSSNIKPMNLIGVDRGENIPAVIALTDPEGCPLSRFKDSLGNPTHILRIGESYKEKQRTIQAKKEVEQRRAGGYSRKYASKAKNLADDMVRNTARDLLYYAVTQDAMLIFENLSRGFGRQGKRTFMAERQYTRMEDWLTAKLAYEGLPSKTYLSKTLAQYTSKTCSNCGFTITSADYDRVLEKLKKTATGWMTTINGKELKVEGQITYYNRYKRQNVVKDLSVELDRLSEESVNNDISSWTKGRSGEALSLLKKRFSHRPVQEKFVCLNCGFETHADEQAALNIARSWLFLRSQEYKKYQTNKTTGNTDKRAFVETWQSFYRKKLKEVWKPAV

SEQ ID NO: 738 - protein, 978 aa, Artificial Sequence
  CasX Variant
QEIKRINKIRRRLVKDSNTKKAGKTGPMKTLLVRVMTPDLRERLENLRKKPENIPQPISNTSRANLNKLLTDYTEMKKAILHVYWEEFQKDPVGLMSRVAQPASKKIDQNKLKPEMDEKGNLTTAGFACSQCGQPLFVYKLEQVSEKGKAYTNYFGRCNVAEHEKLILLAQLKPEKDSDEAVTYSLGKFGQRALDFYSIHVTKESTHPVKPLAQIAGNRYASGPVGKALSDACMGTIASFLSKYQDIIIEHQKVVKGNQKRLESLRELAGKENLEYPSVTLPPQPHTKEGVDAYNEVIARVRMWVNLNLWQKLKLSRDDAKPLLRLKGFPSFPLVERQANEVDWWDMVCNVKKLINEKKEDGKVFWQNLAGYKRQEALRPYLSSEEDRKKGKKFARYQLGDLLLHLEKKHGEDWGPVYDEAWERIDKKVEGLSKHIKLEEERRSEDAQSKAALTDWLRAKASFVIEGLKEADKDEFCRCELKLQKWYGDLRGKPFAIEAENSILDISGFSKQYNCAFIWQKDGVKKLNLYLIINYFKGGKLRFKKIKPEAFEANRFYTVINKKSGEIVPMEVNFNFDDPNLIILPLAFGKRQGREFIWNDLLSLETGSLKLANGRVIEKTLYNRRTRQDEPALFVALTFERREVLDSSNIKPMNLIGVDRGENIPAVIALTDPEGCPLSRFKDSLGNPTHILRIGESYKEKQRTIQAKKEVEQRRAGGYSRKYASKAKNLADDMVRNTARDLLYYAVTQDAMLIFENLSRGFGRQGKRTFMAERQYTRMEDWLTAKLAYEGLPSKTYLSKTLAQYTSKTCSNCGFTITSADYDRVLEKLKKTATGWMTTINGKELKVEGQITYYNRYKRQNVVKDLSVELDRLSEESVNNDISSWTKGRSGEALSLLKKRFSHRPVQEKFVCLNCGFETHADEQAALNIARSWLFLRSQEYKKYQTNKTTGNTDKRAFVETWQSFYRKKLKEVWKPAV

SEQ ID NO: 739 - protein, 978 aa, Artificial Sequence
  CasX Variant
QEIKRINKIRRRLVKDSNTKKAGKTGPMKTLLVRVMTPDLRERLENLRKKPENIPQPISNTSRANLNKLLTDYTEMKKAILHVYWEEFQKDPVGLMSRVAQPASKKIDQNKLKPEMDEKGNLTTAGFACSQCGQPLFVYKLEQVSEKGKAYTNYFGRCNVAEHEKLILLAQLKPEKDSDEAVTYSLGKFGQRALDFYSIHVTKESTHPVKPLAQIAGNRYASGPVGKALSDACMGTIASFLSKYQDIIIEHQKVVKGNQKRLESLRELAGKENLEYPSVTLPPQPHTKEGVDAYNEVIARVRMWVNLNLWQKLKLSRDDAKPLLRLKGFPSFPLVERQANEVDWWDMVCNVKKLINEKKEDGKVFWQNLAGYKRQEALRPYLSSEEDRKKGKKFARYQLGDLLLHLEKKHGEDWGKLYDEAWERIDKKVEGLSKHIKLEEERRSEDAQSKAALTDWLRAKASFVIEGLKEADKDEFCRCELKLQKWYGDLRGKPFAIEAENSILDISGFSKQYNCAFIWQKDGVKKLNLYLIINYFKGGKLRFKKIKPEAFEANRFYTVINKKSGEIVPMEVNFNFDDPNLIILPLAFGKRQGREFIWNDLLSLETGSLKLANGRVIEKTLYNRRTRQDEPALFVALTFERREVLDSSNIKPMNLIGVDRGENIPAVIALTDPEGCPLSRFKDSLGNPTHILRIGESYKEKQRTIQAKKEVEQRRAGGYSRKYASKAKNLADDMVRNTARDLLYYAVTQDAMLIFENLSRGFGRQGKRTFMAERQYTRMEDWLTAKLAYEGLPSKTYLSKTLAQYTSKTCSNCGFTITSADYDRVLEKLKKTATGWMTTINGKELKVEGQITYYNRYKRQNVVKDLSVELDRLSEESVNNDISSWTKGRSGEALSLLKKRFSHRPVQEKFVCLNCGFETHADEQAALNIARSWLFLRSQEYKKYQTNKTTGNTDKRAFVETWQSFYRKKLKEVWKPAV

SEQ ID NO: 740 - protein, 978 aa, Artificial Sequence
  CasX Variant
QEIKRINKIRRRLVKDSNTKKAGKTGPMKTLLVRVMTPDLRERLENLRKKPENIPQPISNTSRANLNKLLTDYTEMKKAILHVYWEEFQKDPVGLMSRVAQPASKKIDQNKLKPEMDEKGNLTTAGFACSQCGQPLFVYKLEQVSEKGKAYTNYFGRCNVAEHEKLILLAQLKPEKDSDEAVTYSLGKFGQRALDFYSIHVTKESTHPVKPLAQIAGNRYASGPVGKALSDACMGTIASFLSKYQDIIIEHQKVVKGNQKRLESLRELAGKENLEYPSVTLPPQPHTKEGVDAYNEVIARVRMWVNLNLWQKLKLSRDDAKPLLRLKGFPSFPLVERQANEVDWWDMVCNVKKLINEKKEDGKVFWQNLAGYKRQEALRPYLSSEEDRKKGKKFARYQLGDLLLHLEKKHGEDWGKVYGEAWERIDKKVEGLSKHIKLEEERRSEDAQSKAALTDWLRAKASFVIEGLKEADKDEFCRCELKLQKWYGDLRGKPFAIEAENSILDISGFSKQYNCAFIWQKDGVKKLNLYLIINYFKGGKLRFKKIKPEAFEANRFYTVINKKSGEIVPMEVNFNFDDPNLIILPLAFGKRQGREFIWNDLLSLETGSLKLANGRVIEKTLYNRRTRQDEPALFVALTFERREVLDSSNIKPMNLIGVDRGENIPAVIALTDPEGCPLSRFKDSLGNPTHILRIGESYKEKQRTIQAKKEVEQRRAGGYSRKYASKAKNLADDMVRNTARDLLYYAVTQDAMLIFENLSRGFGRQGKRTFMAERQYTRMEDWLTAKLAYEGLPSKTYLSKTLAQYTSKTCSNCGFTITSADYDRVLEKLKKTATGWMTTINGKELKVEGQITYYNRYKRQNVVKDLSVELDRLSEESVNNDISSWTKGRSGEALSLLKKRFSHRPVQEKFVCLNCGFETHADEQAALNIARSWLFLRSQEYKKYQTNKTTGNTDKRAFVETWQSFYRKKLKEVWKPAV

SEQ ID NO: 741 - protein, 978 aa, Artificial Sequence
  CasX Variant
QEIKRINKIRRRLVKDSNTKKAGKTGPMKTLLVRVMTPDLRERLENLRKKPENIPQPISNTSRANLNKLLTDYTEMKKAILHVYWEEFQKDPVGLMSRVAQPASKKIDQNKLKPEMDEKGNLTTAGFACSQCGQPLFVYKLEQVSEKGKAYTNYFGRCNVAEHEKLILLAQLKPEKDSDEAVTYSLGKFGQRALDFYSIHVTKESTHPVKPLAQIAGNRYASGPVGKALSDACMGTIASFLSKYQDIIIEHQKVVKGNQKRLESLRELAGKENLEYPSVTLPPQPHTKEGVDAYNEVIARVRMWVNLNLWQKLKLSRDDAKPLLRLKGFPSFPLVERQANEVDWWDMVCNVKKLINEKKEDGKVFWQNLAGYKRQEALRPYLSSEEDRKKGKKFARYQLGDLLLHLEKKHGEDWGKVYDEAWERIDKKVEGLSKHQKLEEERRSEDAQSKAALTDWLRAKASFVIEGLKEADKDEFCRCELKLQKWYGDLRGKPFAIEAENSILDISGFSKQYNCAFIWQKDGVKKLNLYLIINYFKGGKLRFKKIKPEAFEANRFYTVINKKSGEIVPMEVNFNFDDPNLIILPLAFGKRQGREFIWNDLLSLETGSLKLANGRVIEKTLYNRRTRQDEPALFVALTFERREVLDSSNIKPMNLIGVDRGENIPAVIALTDPEGCPLSRFKDSLGNPTHILRIGESYKEKQRTIQAKKEVEQRRAGGYSRKYASKAKNLADDMVRNTARDLLYYAVTQDAMLIFENLSRGFGRQGKRTFMAERQYTRMEDWLTAKLAYEGLPSKTYLSKTLAQYTSKTCSNCGFTITSADYDRVLEKLKKTATGWMTTINGKELKVEGQITYYNRYKRQNVVKDLSVELDRLSEESVNNDISSWTKGRSGEALSLLKKRFSHRPVQEKFVCLNCGFETHADEQAALNIARSWLFLRSQEYKKYQTNKTTGNTDKRAFVETWQSFYRKKLKEVWKPAV

SEQ ID NO: 742 - protein, 978 aa, Artificial Sequence
  CasX Variant
QEIKRINKIRRRLVKDSNTKKAGKTGPMKTLLVRVMTPDLRERLENLRKKPENIPQPISNTSRANLNKLLTDYTEMKKAILHVYWEEFQKDPVGLMSRVAQPASKKIDQNKLKPEMDEKGNLTTAGFACSQCGQPLFVYKLEQVSEKGKAYTNYFGRCNVAEHEKLILLAQLKPEKDSDEAVTYSLGKFGQRALDFYSIHVTKESTHPVKPLAQIAGNRYASGPVGKALSDACMGTIASFLSKYQDIIIEHQKVVKGNQKRLESLRELAGKENLEYPSVTLPPQPHTKEGVDAYNEVIARVRMWVNLNLWQKLKLSRDDAKPLLRLKGFPSFPLVERQANEVDWWDMVCNVKKLINEKKEDGKVFWQNLAGYKRQEALRPYLSSEEDRKKGKKFARYQLGDLLLHLEKKHGEDWGKVYDEAWERIDKKVEGLSKHIKLEEEDRSEDAQSKAALTDWLRAKASFVIEGLKEADKDEFCRCELKLQKWYGDLRGKPFAIEAENSILDISGFSKQYNCAFIWQKDGVKKLNLYLIINYFKGGKLRFKKIKPEAFEANRFYTVINKKSGEIVPMEVNFNFDDPNLIILPLAFGKRQGREFIWNDLLSLETGSLKLANGRVIEKTLYNRRTRQDEPALFVALTFERREVLDSSNIKPMNLIGVDRGENIPAVIALTDPEGCPLSRFKDSLGNPTHILRIGESYKEKQRTIQAKKEVEQRRAGGYSRKYASKAKNLADDMVRNTARDLLYYAVTQDAMLIFENLSRGFGRQGKRTFMAERQYTRMEDWLTAKLAYEGLPSKTYLSKTLAQYTSKTCSNCGFTITSADYDRVLEKLKKTATGWMTTINGKELKVEGQITYYNRYKRQNVVKDLSVELDRLSEESVNNDISSWTKGRSGEALSLLKKRFSHRPVQEKFVCLNCGFETHADEQAALNIARSWLFLRSQEYKKYQTNKTTGNTDKRAFVETWQSFYRKKLKEVWKPAV

SEQ ID NO: 743 - protein, 978 aa, Artificial Sequence
  CasX Variant
QEIKRINKIRRRLVKDSNTKKAGKTGPMKTLLVRVMTPDLRERLENLRKKPENIPQPISNTSRANLNKLLTDYTEMKKAILHVYWEEFQKDPVGLMSRVAQPASKKIDQNKLKPEMDEKGNLTTAGFACSQCGQPLFVYKLEQVSEKGKAYTNYFGRCNVAEHEKLILLAQLKPEKDSDEAVTYSLGKFGQRALDFYSIHVTKESTHPVKPLAQIAGNRYASGPVGKALSDACMGTIASFLSKYQDIIIEHQKVVKGNQKRLESLRELAGKENLEYPSVTLPPQPHTKEGVDAYNEVIARVRMWVNLNLWQKLKLSRDDAKPLLRLKGFPSFPLVERQANEVDWWDMVCNVKKLINEKKEDGKVFWQNLAGYKRQEALRPYLSSEEDRKKGKKFARYQLGDLLLHLEKKHGEDWGKVYDEAWERIDKKVEGLSKHIKLEEERRSEDAQSKAATTDWLRAKASFVIEGLKEADKDEFCRCELKLQKWYGDLRGKPFAIEAENSILDISGFSKQYNCAFIWQKDGVKKLNLYLIINYFKGGKLRFKKIKPEAFEANRFYTVINKKSGEIVPMEVNFNFDDPNLIILPLAFGKRQGREFIWNDLLSLETGSLKLANGRVIEKTLYNRRTRQDEPALFVALTFERREVLDSSNIKPMNLIGVDRGENIPAVIALTDPEGCPLSRFKDSLGNPTHILRIGESYKEKQRTIQAKKEVEQRRAGGYSRKYASKAKNLADDMVRNTARDLLYYAVTQDAMLIFENLSRGFGRQGKRTFMAERQYTRMEDWLTAKLAYEGLPSKTYLSKTLAQYTSKTCSNCGFTITSADYDRVLEKLKKTATGWMTTINGKELKVEGQITYYNRYKRQNVVKDLSVELDRLSEESVNNDISSWTKGRSGEALSLLKKRFSHRPVQEKFVCLNCGFETHADEQAALNIARSWLFLRSQEYKKYQTNKTTGNTDKRAFVETWQSFYRKKLKEVWKPAV

SEQ ID NO: 744 - protein, 978 aa, Artificial Sequence
  CasX Variant
QEIKRINKIRRRLVKDSNTKKAGKTGPMKTLLVRVMTPDLRERLENLRKKPENIPQPISNTSRANLNKLLTDYTEMKKAILHVYWEEFQKDPVGLMSRVAQPASKKIDQNKLKPEMDEKGNLTTAGFACSQCGQPLFVYKLEQVSEKGKAYTNYFGRCNVAEHEKLILLAQLKPEKDSDEAVTYSLGKFGQRALDFYSIHVTKESTHPVKPLAQIAGNRYASGPVGKALSDACMGTIASFLSKYQDIIIEHQKVVKGNQKRLESLRELAGKENLEYPSVTLPPQPHTKEGVDAYNEVIARVRMWVNLNLWQKLKLSRDDAKPLLRLKGFPSFPLVERQANEVDWWDMVCNVKKLINEKKEDGKVFWQNLAGYKRQEALRPYLSSEEDRKKGKKFARYQLGDLLLHLEKKHGEDWGKVYDEAWERIDKKVEGLSKHIKLEEERRSEDAQSKAALTDWLRAKTSFVIEGLKEADKDEFCRCELKLQKWYGDLRGKPFAIEAENSILDISGFSKQYNCAFIWQKDGVKKLNLYLIINYFKGGKLRFKKIKPEAFEANRFYTVINKKSGEIVPMEVNFNFDDPNLIILPLAFGKRQGREFIWNDLLSLETGSLKLANGRVIEKTLYNRRTRQDEPALFVALTFERREVLDSSNIKPMNLIGVDRGENIPAVIALTDPEGCPLSRFKDSLGNPTHILRIGESYKEKQRTIQAKKEVEQRRAGGYSRKYASKAKNLADDMVRNTARDLLYYAVTQDAMLIFENLSRGFGRQGKRTFMAERQYTRMEDWLTAKLAYEGLPSKTYLSKTLAQYTSKTCSNCGFTITSADYDRVLEKLKKTATGWMTTINGKELKVEGQITYYNRYKRQNVVKDLSVELDRLSEESVNNDISSWTKGRSGEALSLLKKRFSHRPVQEKFVCLNCGFETHADEQAALNIARSWLFLRSQEYKKYQTNKTTGNTDKRAFVETWQSFYRKKLKEVWKPAV

SEQ ID NO: 745 - protein, 978 aa, Artificial Sequence
  CasX Variant
QEIKRINKIRRRLVKDSNTKKAGKTGPMKTLLVRVMTPDLRERLENLRKKPENIPQPISNTSRANLNKLLTDYTEMKKAILHVYWEEFQKDPVGLMSRVAQPASKKIDQNKLKPEMDEKGNLTTAGFACSQCGQPLFVYKLEQVSEKGKAYTNYFGRCNVAEHEKLILLAQLKPEKDSDEAVTYSLGKFGQRALDFYSIHVTKESTHPVKPLAQIAGNRYASGPVGKALSDACMGTIASFLSKYQDIIIEHQKVVKGNQKRLESLRELAGKENLEYPSVTLPPQPHTKEGVDAYNEVIARVRMWVNLNLWQKLKLSRDDAKPLLRLKGFPSFPLVERQANEVDWWDMVCNVKKLINEKKEDGKVFWQNLAGYKRQEALRPYLSSEEDRKKGKKFARYQLGDLLLHLEKKHGEDWGKVYDEAWERIDKKVEGLSKHIKLEEERRSEDAQSKAALTDWLRAKKSFVIEGLKEADKDEFCRCELKLQKWYGDLRGKPFAIEAENSILDISGFSKQYNCAFIWQKDGVKKLNLYLIINYFKGGKLRFKKIKPEAFEANRFYTVINKKSGEIVPMEVNFNFDDPNLIILPLAFGKRQGREFIWNDLLSLETGSLKLANGRVIEKTLYNRRTRQDEPALFVALTFERREVLDSSNIKPMNLIGVDRGENIPAVIALTDPEGCPLSRFKDSLGNPTHILRIGESYKEKQRTIQAKKEVEQRRAGGYSRKYASKAKNLADDMVRNTARDLLYYAVTQDAMLIFENLSRGFGRQGKRTFMAERQYTRMEDWLTAKLAYEGLPSKTYLSKTLAQYTSKTCSNCGFTITSADYDRVLEKLKKTATGWMTTINGKELKVEGQITYYNRYKRQNVVKDLSVELDRLSEESVNNDISSWTKGRSGEALSLLKKRFSHRPVQEKFVCLNCGFETHADEQAALNIARSWLFLRSQEYKKYQTNKTTGNTDKRAFVETWQSFYRKKLKEVWKPAV

SEQ ID NO: 746 - protein, 978 aa, Artificial Sequence
  CasX Variant
QEIKRINKIRRRLVKDSNTKKAGKTGPMKTLLVRVMTPDLRERLENLRKKPENIPQPISNTSRANLNKLLTDYTEMKKAILHVYWEEFQKDPVGLMSRVAQPASKKIDQNKLKPEMDEKGNLTTAGFACSQCGQPLFVYKLEQVSEKGKAYTNYFGRCNVAEHEKLILLAQLKPEKDSDEAVTYSLGKFGQRALDFYSIHVTKESTHPVKPLAQIAGNRYASGPVGKALSDACMGTIASFLSKYQDIIIEHQKVVKGNQKRLESLRELAGKENLEYPSVTLPPQPHTKEGVDAYNEVIARVRMWVNLNLWQKLKLSRDDAKPLLRLKGFPSFPLVERQANEVDWWDMVCNVKKLINEKKEDGKVFWQNLAGYKRQEALRPYLSSEEDRKKGKKFARYQLGDLLLHLEKKHGEDWGKVYDEAWERIDKKVEGLSKHIKLEEERRSEDAQSKAALTDWLRAKASFVEEGLKEADKDEFCRCELKLQKWYGDLRGKPFAIEAENSILDISGFSKQYNCAFIWQKDGVKKLNLYLIINYFKGGKLRFKKIKPEAFEANRFYTVINKKSGEIVPMEVNFNFDDPNLIILPLAFGKRQGREFIWNDLLSLETGSLKLANGRVIEKTLYNRRTRQDEPALFVALTFERREVLDSSNIKPMNLIGVDRGENIPAVIALTDPEGCPLSRFKDSLGNPTHILRIGESYKEKQRTIQAKKEVEQRRAGGYSRKYASKAKNLADDMVRNTARDLLYYAVTQDAMLIFENLSRGFGRQGKRTFMAERQYTRMEDWLTAKLAYEGLPSKTYLSKTLAQYTSKTCSNCGFTITSADYDRVLEKLKKTATGWMTTINGKELKVEGQITYYNRYKRQNVVKDLSVELDRLSEESVNNDISSWTKGRSGEALSLLKKRFSHRPVQEKFVCLNCGFETHADEQAALNIARSWLFLRSQEYKKYQTNKTTGNTDKRAFVETWQSFYRKKLKEVWKPAV

SEQ ID NO: 747 - protein, 979 aa, Artificial Sequence
  CasX Variant
QEIKRINKIRRRLVKDSNTKKAGKTGPMKTLLVRVMTPDLRERLENLRKKPENIPQPISNTSRANLNKLLTDYTEMKKAILHVYWEEFQKDPVGLMSRVAQPASKKIDQNKLKPEMDEKGNLTTAGFACSQCGQPLFVYKLEQVSEKGKAYTNYFGRCNVAEHEKLILLAQLKPEKDSDEAVTYSLGKFGQRALDFYSIHVTKESTHPVKPLAQIAGNRYASGPVGKALSDACMGTIASFLSKYQDIIIEHQKVVKGNQKRLESLRELAGKENLEYPSVTLPPQPHTKEGVDAYNEVIARVRMWVNLNLWQKLKLSRDDAKPLLRLKGFPSFPLVERQANEVDWWDMVCNVKKLINEKKEDGKVFWQNLAGYKRQEALRPYLSSEEDRKKGKKFARYQLGDLLLHLEKKHGEDWGKVYDEAWERIDKKVEGLSKHIKLEEERRSEDAQSKAALTDWLRAKASFVISEGLKEADKDEFCRCELKLQKWYGDLRGKPFAIEAENSILDISGFSKQYNCAFIWQKDGVKKLNLYLIINYFKGGKLRFKKIKPEAFEANRFYTVINKKSGEIVPMEVNFNFDDPNLIILPLAFGKRQGREFIWNDLLSLETGSLKLANGRVIEKTLYNRRTRQDEPALFVALTFERREVLDSSNIKPMNLIGVDRGENIPAVIALTDPEGCPLSRFKDSLGNPTHILRIGESYKEKQRTIQAKKEVEQRRAGGYSRKYASKAKNLADDMVRNTARDLLYYAVTQDAMLIFENLSRGFGRQGKRTFMAERQYTRMEDWLTAKLAYEGLPSKTYLSKTLAQYTSKTCSNCGFTITSADYDRVLEKLKKTATGWMTTINGKELKVEGQITYYNRYKRQNVVKDLSVELDRLSEESVNNDISSWTKGRSGEALSLLKKRFSHRPVQEKFVCLNCGFETHADEQAALNIARSWLFLRSQEYKKYQTNKTTGNTDKRAFVETWQSFYRKKLKEVWKPAV

SEQ ID NO: 748 - protein, 979 aa, Artificial Sequence
  CasX Variant
QEIKRINKIRRRLVKDSNTKKAGKTGPMKTLLVRVMTPDLRERLENLRKKPENIPQPISNTSRANLNKLLTDYTEMKKAILHVYWEEFQKDPVGLMSRVAQPASKKIDQNKLKPEMDEKGNLTTAGFACSQCGQPLFVYKLEQVSEKGKAYTNYFGRCNVAEHEKLILLAQLKPEKDSDEAVTYSLGKFGQRALDFYSIHVTKESTHPVKPLAQIAGNRYASGPVGKALSDACMGTIASFLSKYQDIIIEHQKVVKGNQKRLESLRELAGKENLEYPSVTLPPQPHTKEGVDAYNEVIARVRMWVNLNLWQKLKLSRDDAKPLLRLKGFPSFPLVERQANEVDWWDMVCNVKKLINEKKEDGKVFWQNLAGYKRQEALRPYLSSEEDRKKGKKFARYQLGDLLLHLEKKHGEDWGKVYDEAWERIDKKVEGLSKHIKLEEERRSEDAQSKAALTDWLRAKASFVIERGLKEADKDEFCRCELKLQKWYGDLRGKPFAIEAENSILDISGFSKQYNCAFIWQKDGVKKLNLYLIINYFKGGKLRFKKIKPEAFEANRFYTVINKKSGEIVPMEVNFNFDDPNLIILPLAFGKRQGREFIWNDLLSLETGSLKLANGRVIEKTLYNRRTRQDEPALFVALTFERREVLDSSNIKPMNLIGVDRGENIPAVIALTDPEGCPLSRFKDSLGNPTHILRIGESYKEKQRTIQAKKEVEQRRAGGYSRKYASKAKNLADDMVRNTARDLLYYAVTQDAMLIFENLSRGFGRQGKRTFMAERQYTRMEDWLTAKLAYEGLPSKTYLSKTLAQYTSKTCSNCGFTITSADYDRVLEKLKKTATGWMTTINGKELKVEGQITYYNRYKRQNVVKDLSVELDRLSEESVNNDISSWTKGRSGEALSLLKKRFSHRPVQEKFVCLNCGFETHADEQAALNIARSWLFLRSQEYKKYQTNKTTGNTDKRAFVETWQSFYRKKLKEVWKPAV

SEQ ID NO: 749 - protein, 978 aa, Artificial Sequence
  CasX Variant
QEIKRINKIRRRLVKDSNTKKAGKTGPMKTLLVRVMTPDLRERLENLRKKPENIPQPISNTSRANLNKLLTDYTEMKKAILHVYWEEFQKDPVGLMSRVAQPASKKIDQNKLKPEMDEKGNLTTAGFACSQCGQPLFVYKLEQVSEKGKAYTNYFGRCNVAEHEKLILLAQLKPEKDSDEAVTYSLGKFGQRALDFYSIHVTKESTHPVKPLAQIAGNRYASGPVGKALSDACMGTIASFLSKYQDIIIEHQKVVKGNQKRLESLRELAGKENLEYPSVTLPPQPHTKEGVDAYNEVIARVRMWVNLNLWQKLKLSRDDAKPLLRLKGFPSFPLVERQANEVDWWDMVCNVKKLINEKKEDGKVFWQNLAGYKRQEALRPYLSSEEDRKKGKKFARYQLGDLLLHLEKKHGEDWGKVYDEAWERIDKKVEGLSKHIKLEEERRSEDAQSKAALTDWLRAKASFVIEGKKEADKDEFCRCELKLQKWYGDLRGKPFAIEAENSILDISGFSKQYNCAFIWQKDGVKKLNLYLIINYFKGGKLRFKKIKPEAFEANRFYTVINKKSGEIVPMEVNFNFDDPNLIILPLAFGKRQGREFIWNDLLSLETGSLKLANGRVIEKTLYNRRTRQDEPALFVALTFERREVLDSSNIKPMNLIGVDRGENIPAVIALTDPEGCPLSRFKDSLGNPTHILRIGESYKEKQRTIQAKKEVEQRRAGGYSRKYASKAKNLADDMVRNTARDLLYYAVTQDAMLIFENLSRGFGRQGKRTFMAERQYTRMEDWLTAKLAYEGLPSKTYLSKTLAQYTSKTCSNCGFTITSADYDRVLEKLKKTATGWMTTINGKELKVEGQITYYNRYKRQNVVKDLSVELDRLSEESVNNDISSWTKGRSGEALSLLKKRFSHRPVQEKFVCLNCGFETHADEQAALNIARSWLFLRSQEYKKYQTNKTTGNTDKRAFVETWQSFYRKKLKEVWKPAV

SEQ ID NO: 750 - protein, 978 aa, Artificial Sequence
  CasX Variant
QEIKRINKIRRRLVKDSNTKKAGKTGPMKTLLVRVMTPDLRERLENLRKKPENIPQPISNTSRANLNKLLTDYTEMKKAILHVYWEEFQKDPVGLMSRVAQPASKKIDQNKLKPEMDEKGNLTTAGFACSQCGQPLFVYKLEQVSEKGKAYTNYFGRCNVAEHEKLILLAQLKPEKDSDEAVTYSLGKFGQRALDFYSIHVTKESTHPVKPLAQIAGNRYASGPVGKALSDACMGTIASFLSKYQDIIIEHQKVVKGNQKRLESLRELAGKENLEYPSVTLPPQPHTKEGVDAYNEVIARVRMWVNLNLWQKLKLSRDDAKPLLRLKGFPSFPLVERQANEVDWWDMVCNVKKLINEKKEDGKVFWQNLAGYKRQEALRPYLSSEEDRKKGKKFARYQLGDLLLHLEKKHGEDWGKVYDEAWERIDKKVEGLSKHIKLEEERRSEDAQSKAALTDWLRAKASFVIEGSKEADKDEFCRCELKLQKWYGDLRGKPFAIEAENSILDISGFSKQYNCAFIWQKDGVKKLNLYLIINYFKGGKLRFKKIKPEAFEANRFYTVINKKSGEIVPMEVNFNFDDPNLIILPLAFGKRQGREFIWNDLLSLETGSLKLANGRVIEKTLYNRRTRQDEPALFVALTFERREVLDSSNIKPMNLIGVDRGENIPAVIALTDPEGCPLSRFKDSLGNPTHILRIGESYKEKQRTIQAKKEVEQRRAGGYSRKYASKAKNLADDMVRNTARDLLYYAVTQDAMLIFENLSRGFGRQGKRTFMAERQYTRMEDWLTAKLAYEGLPSKTYLSKTLAQYTSKTCSNCGFTITSADYDRVLEKLKKTATGWMTTINGKELKVEGQITYYNRYKRQNVVKDLSVELDRLSEESVNNDISSWTKGRSGEALSLLKKRFSHRPVQEKFVCLNCGFETHADEQAALNIARSWLFLRSQEYKKYQTNKTTGNTDKRAFVETWQSFYRKKLKEVWKPAV

SEQ ID NO: 751 - protein, 979 aa, Artificial Sequence
  CasX Variant
QEIKRINKIRRRLVKDSNTKKAGKTGPMKTLLVRVMTPDLRERLENLRKKPENIPQPISNTSRANLNKLLTDYTEMKKAILHVYWEEFQKDPVGLMSRVAQPASKKIDQNKLKPEMDEKGNLTTAGFACSQCGQPLFVYKLEQVSEKGKAYTNYFGRCNVAEHEKLILLAQLKPEKDSDEAVTYSLGKFGQRALDFYSIHVTKESTHPVKPLAQIAGNRYASGPVGKALSDACMGTIASFLSKYQDIIIEHQKVVKGNQKRLESLRELAGKENLEYPSVTLPPQPHTKEGVDAYNEVIARVRMWVNLNLWQKLKLSRDDAKPLLRLKGFPSFPLVERQANEVDWWDMVCNVKKLINEKKEDGKVFWQNLAGYKRQEALRPYLSSEEDRKKGKKFARYQLGDLLLHLEKKHGEDWGKVYDEAWERIDKKVEGLSKHIKLEEERRSEDAQSKAALTDWLRAKASFVIEGLKEADDKDEFCRCELKLQKWYGDLRGKPFAIEAENSILDISGFSKQYNCAFIWQKDGVKKLNLYLIINYFKGGKLRFKKIKPEAFEANRFYTVINKKSGEIVPMEVNFNFDDPNLIILPLAFGKRQGREFIWNDLLSLETGSLKLANGRVIEKTLYNRRTRQDEPALFVALTFERREVLDSSNIKPMNLIGVDRGENIPAVIALTDPEGCPLSRFKDSLGNPTHILRIGESYKEKQRTIQAKKEVEQRRAGGYSRKYASKAKNLADDMVRNTARDLLYYAVTQDAMLIFENLSRGFGRQGKRTFMAERQYTRMEDWLTAKLAYEGLPSKTYLSKTLAQYTSKTCSNCGFTITSADYDRVLEKLKKTATGWMTTINGKELKVEGQITYYNRYKRQNVVKDLSVELDRLSEESVNNDISSWTKGRSGEALSLLKKRFSHRPVQEKFVCLNCGFETHADEQAALNIARSWLFLRSQEYKKYQTNKTTGNTDKRAFVETWQSFYRKKLKEVWKPAV

SEQ ID NO: 752 - protein, 979 aa, Artificial Sequence
  CasX Variant
QEIKRINKIRRRLVKDSNTKKAGKTGPMKTLLVRVMTPDLRERLENLRKKPENIPQPISNTSRANLNKLLTDYTEMKKAILHVYWEEFQKDPVGLMSRVAQPASKKIDQNKLKPEMDEKGNLTTAGFACSQCGQPLFVYKLEQVSEKGKAYTNYFGRCNVAEHEKLILLAQLKPEKDSDEAVTYSLGKFGQRALDFYSIHVTKESTHPVKPLAQIAGNRYASGPVGKALSDACMGTIASFLSKYQDIIIEHQKVVKGNQKRLESLRELAGKENLEYPSVTLPPQPHTKEGVDAYNEVIARVRMWVNLNLWQKLKLSRDDAKPLLRLKGFPSFPLVERQANEVDWWDMVCNVKKLINEKKEDGKVFWQNLAGYKRQEALRPYLSSEEDRKKGKKFARYQLGDLLLHLEKKHGEDWGKVYDEAWERIDKKVEGLSKHIKLEEERRSEDAQSKAALTDWLRAKASFVIEGLKEADKDQEFCRCELKLQKWYGDLRGKPFAIEAENSILDISGFSKQYNCAFIWQKDGVKKLNLYLIINYFKGGKLRFKKIKPEAFEANRFYTVINKKSGEIVPMEVNFNFDDPNLIILPLAFGKRQGREFIWNDLLSLETGSLKLANGRVIEKTLYNRRTRQDEPALFVALTFERREVLDSSNIKPMNLIGVDRGENIPAVIALTDPEGCPLSRFKDSLGNPTHILRIGESYKEKQRTIQAKKEVEQRRAGGYSRKYASKAKNLADDMVRNTARDLLYYAVTQDAMLIFENLSRGFGRQGKRTFMAERQYTRMEDWLTAKLAYEGLPSKTYLSKTLAQYTSKTCSNCGFTITSADYDRVLEKLKKTATGWMTTINGKELKVEGQITYYNRYKRQNVVKDLSVELDRLSEESVNNDISSWTKGRSGEALSLLKKRFSHRPVQEKFVCLNCGFETHADEQAALNIARSWLFLRSQEYKKYQTNKTTGNTDKRAFVETWQSFYRKKLKEVWKPAV

SEQ ID NO: 753 - protein, 978 aa, Artificial Sequence
  CasX Variant
QEIKRINKIRRRLVKDSNTKKAGKTGPMKTLLVRVMTPDLRERLENLRKKPENIPQPISNTSRANLNKLLTDYTEMKKAILHVYWEEFQKDPVGLMSRVAQPASKKIDQNKLKPEMDEKGNLTTAGFACSQCGQPLFVYKLEQVSEKGKAYTNYFGRCNVAEHEKLILLAQLKPEKDSDEAVTYSLGKFGQRALDFYSIHVTKESTHPVKPLAQIAGNRYASGPVGKALSDACMGTIASFLSKYQDIIIEHQKVVKGNQKRLESLRELAGKENLEYPSVTLPPQPHTKEGVDAYNEVIARVRMWVNLNLWQKLKLSRDDAKPLLRLKGFPSFPLVERQANEVDWWDMVCNVKKLINEKKEDGKVFWQNLAGYKRQEALRPYLSSEEDRKKGKKFARYQLGDLLLHLEKKHGEDWGKVYDEAWERIDKKVEGLSKHIKLEEERRSEDAQSKAALTDWLRAKASFVIEGLKEADKDEKCRCELKLQKWYGDLRGKPFAIEAENSILDISGFSKQYNCAFIWQKDGVKKLNLYLIINYFKGGKLRFKKIKPEAFEANRFYTVINKKSGEIVPMEVNFNFDDPNLIILPLAFGKRQGREFIWNDLLSLETGSLKLANGRVIEKTLYNRRTRQDEPALFVALTFERREVLDSSNIKPMNLIGVDRGENIPAVIALTDPEGCPLSRFKDSLGNPTHILRIGESYKEKQRTIQAKKEVEQRRAGGYSRKYASKAKNLADDMVRNTARDLLYYAVTQDAMLIFENLSRGFGRQGKRTFMAERQYTRMEDWLTAKLAYEGLPSKTYLSKTLAQYTSKTCSNCGFTITSADYDRVLEKLKKTATGWMTTINGKELKVEGQITYYNRYKRQNVVKDLSVELDRLSEESVNNDISSWTKGRSGEALSLLKKRFSHRPVQEKFVCLNCGFETHADEQAALNIARSWLFLRSQEYKKYQTNKTTGNTDKRAFVETWQSFYRKKLKEVWKPAV

SEQ ID NO: 754 - protein, 978 aa, Artificial Sequence
  CasX Variant
QEIKRINKIRRRLVKDSNTKKAGKTGPMKTLLVRVMTPDLRERLENLRKKPENIPQPISNTSRANLNKLLTDYTEMKKAILHVYWEEFQKDPVGLMSRVAQPASKKIDQNKLKPEMDEKGNLTTAGFACSQCGQPLFVYKLEQVSEKGKAYTNYFGRCNVAEHEKLILLAQLKPEKDSDEAVTYSLGKFGQRALDFYSIHVTKESTHPVKPLAQIAGNRYASGPVGKALSDACMGTIASFLSKYQDIIIEHQKVVKGNQKRLESLRELAGKENLEYPSVTLPPQPHTKEGVDAYNEVIARVRMWVNLNLWQKLKLSRDDAKPLLRLKGFPSFPLVERQANEVDWWDMVCNVKKLINEKKEDGKVFWQNLAGYKRQEALRPYLSSEEDRKKGKKFARYQLGDLLLHLEKKHGEDWGKVYDEAWERIDKKVEGLSKHIKLEEERRSEDAQSKAALTDWLRAKASFVIEGLKEADKDEFCRDELKLQKWYGDLRGKPFAIEAENSILDISGFSKQYNCAFIWQKDGVKKLNLYLIINYFKGGKLRFKKIKPEAFEANRFYTVINKKSGEIVPMEVNFNFDDPNLIILPLAFGKRQGREFIWNDLLSLETGSLKLANGRVIEKTLYNRRTRQDEPALFVALTFERREVLDSSNIKPMNLIGVDRGENIPAVIALTDPEGCPLSRFKDSLGNPTHILRIGESYKEKQRTIQAKKEVEQRRAGGYSRKYASKAKNLADDMVRNTARDLLYYAVTQDAMLIFENLSRGFGRQGKRTFMAERQYTRMEDWLTAKLAYEGLPSKTYLSKTLAQYTSKTCSNCGFTITSADYDRVLEKLKKTATGWMTTINGKELKVEGQITYYNRYKRQNVVKDLSVELDRLSEESVNNDISSWTKGRSGEALSLLKKRFSHRPVQEKFVCLNCGFETHADEQAALNIARSWLFLRSQEYKKYQTNKTTGNTDKRAFVETWQSFYRKKLKEVWKPAV

SEQ ID NO: 755 - protein, 979 aa, Artificial Sequence
  CasX Variant
QEIKRINKIRRRLVKDSNTKKAGKTGPMKTLLVRVMTPDLRERLENLRKKPENIPQPISNTSRANLNKLLTDYTEMKKAILHVYWEEFQKDPVGLMSRVAQPASKKIDQNKLKPEMDEKGNLTTAGFACSQCGQPLFVYKLEQVSEKGKAYTNYFGRCNVAEHEKLILLAQLKPEKDSDEAVTYSLGKFGQRALDFYSIHVTKESTHPVKPLAQIAGNRYASGPVGKALSDACMGTIASFLSKYQDIIIEHQKVVKGNQKRLESLRELAGKENLEYPSVTLPPQPHTKEGVDAYNEVIARVRMWVNLNLWQKLKLSRDDAKPLLRLKGFPSFPLVERQANEVDWWDMVCNVKKLINEKKEDGKVFWQNLAGYKRQEALRPYLSSEEDRKKGKKFARYQLGDLLLHLEKKHGEDWGKVYDEAWERIDKKVEGLSKHIKLEEERRSEDAQSKAALTDWLRAKASFVIEGLKEADKDEFCRCVELKLQKWYGDLRGKPFAIEAENSILDISGFSKQYNCAFIWQKDGVKKLNLYLIINYFKGGKLRFKKIKPEAFEANRFYTVINKKSGEIVPMEVNFNFDDPNLIILPLAFGKRQGREFIWNDLLSLETGSLKLANGRVIEKTLYNRRTRQDEPALFVALTFERREVLDSSNIKPMNLIGVDRGENIPAVIALTDPEGCPLSRFKDSLGNPTHILRIGESYKEKQRTIQAKKEVEQRRAGGYSRKYASKAKNLADDMVRNTARDLLYYAVTQDAMLIFENLSRGFGRQGKRTFMAERQYTRMEDWLTAKLAYEGLPSKTYLSKTLAQYTSKTCSNCGFTITSADYDRVLEKLKKTATGWMTTINGKELKVEGQITYYNRYKRQNVVKDLSVELDRLSEESVNNDISSWTKGRSGEALSLLKKRFSHRPVQEKFVCLNCGFETHADEQAALNIARSWLFLRSQEYKKYQTNKTTGNTDKRAFVETWQSFYRKKLKEVWKPAV

SEQ ID NO: 756 - protein, 978 aa, Artificial Sequence
  CasX Variant
QEIKRINKIRRRLVKDSNTKKAGKTGPMKTLLVRVMTPDLRERLENLRKKPENIPQPISNTSRANLNKLLTDYTEMKKAILHVYWEEFQKDPVGLMSRVAQPASKKIDQNKLKPEMDEKGNLTTAGFACSQCGQPLFVYKLEQVSEKGKAYTNYFGRCNVAEHEKLILLAQLKPEKDSDEAVTYSLGKFGQRALDFYSIHVTKESTHPVKPLAQIAGNRYASGPVGKALSDACMGTIASFLSKYQDIIIEHQKVVKGNQKRLESLRELAGKENLEYPSVTLPPQPHTKEGVDAYNEVIARVRMWVNLNLWQKLKLSRDDAKPLLRLKGFPSFPLVERQANEVDWWDMVCNVKKLINEKKEDGKVFWQNLAGYKRQEALRPYLSSEEDRKKGKKFARYQLGDLLLHLEKKHGEDWGKVYDEAWERIDKKVEGLSKHIKLEEERRSEDAQSKAALTDWLRAKASFVIEGLKEADKDEFCRCDLKLQKWYGDLRGKPFAIEAENSILDISGFSKQYNCAFIWQKDGVKKLNLYLIINYFKGGKLRFKKIKPEAFEANRFYTVINKKSGEIVPMEVNFNFDDPNLIILPLAFGKRQGREFIWNDLLSLETGSLKLANGRVIEKTLYNRRTRQDEPALFVALTFERREVLDSSNIKPMNLIGVDRGENIPAVIALTDPEGCPLSRFKDSLGNPTHILRIGESYKEKQRTIQAKKEVEQRRAGGYSRKYASKAKNLADDMVRNTARDLLYYAVTQDAMLIFENLSRGFGRQGKRTFMAERQYTRMEDWLTAKLAYEGLPSKTYLSKTLAQYTSKTCSNCGFTITSADYDRVLEKLKKTATGWMTTINGKELKVEGQITYYNRYKRQNVVKDLSVELDRLSEESVNNDISSWTKGRSGEALSLLKKRFSHRPVQEKFVCLNCGFETHADEQAALNIARSWLFLRSQEYKKYQTNKTTGNTDKRAFVETWQSFYRKKLKEVWKPAV

SEQ ID NO: 757 - protein, 978 aa, Artificial Sequence
  CasX Variant
QEIKRINKIRRRLVKDSNTKKAGKTGPMKTLLVRVMTPDLRERLENLRKKPENIPQPISNTSRANLNKLLTDYTEMKKAILHVYWEEFQKDPVGLMSRVAQPASKKIDQNKLKPEMDEKGNLTTAGFACSQCGQPLFVYKLEQVSEKGKAYTNYFGRCNVAEHEKLILLAQLKPEKDSDEAVTYSLGKFGQRALDFYSIHVTKESTHPVKPLAQIAGNRYASGPVGKALSDACMGTIASFLSKYQDIIIEHQKVVKGNQKRLESLRELAGKENLEYPSVTLPPQPHTKEGVDAYNEVIARVRMWVNLNLWQKLKLSRDDAKPLLRLKGFPSFPLVERQANEVDWWDMVCNVKKLINEKKEDGKVFWQNLAGYKRQEALRPYLSSEEDRKKGKKFARYQLGDLLLHLEKKHGEDWGKVYDEAWERIDKKVEGLSKHIKLEEERRSEDAQSKAALTDWLRAKASFVIEGLKEADKDEFCRCERKLQKWYGDLRGKPFAIEAENSILDISGFSKQYNCAFIWQKDGVKKLNLYLIINYFKGGKLRFKKIKPEAFEANRFYTVINKKSGEIVPMEVNFNFDDPNLIILPLAFGKRQGREFIWNDLLSLETGSLKLANGRVIEKTLYNRRTRQDEPALFVALTFERREVLDSSNIKPMNLIGVDRGENIPAVIALTDPEGCPLSRFKDSLGNPTHILRIGESYKEKQRTIQAKKEVEQRRAGGYSRKYASKAKNLADDMVRNTARDLLYYAVTQDAMLIFENLSRGFGRQGKRTFMAERQYTRMEDWLTAKLAYEGLPSKTYLSKTLAQYTSKTCSNCGFTITSADYDRVLEKLKKTATGWMTTINGKELKVEGQITYYNRYKRQNVVKDLSVELDRLSEESVNNDISSWTKGRSGEALSLLKKRFSHRPVQEKFVCLNCGFETHADEQAALNIARSWLFLRSQEYKKYQTNKTTGNTDKRAFVETWQSFYRKKLKEVWKPAV

SEQ ID NO: 758 - protein, 978 aa, Artificial Sequence
  CasX Variant
QEIKRINKIRRRLVKDSNTKKAGKTGPMKTLLVRVMTPDLRERLENLRKKPENIPQPISNTSRANLNKLLTDYTEMKKAILHVYWEEFQKDPVGLMSRVAQPASKKIDQNKLKPEMDEKGNLTTAGFACSQCGQPLFVYKLEQVSEKGKAYTNYFGRCNVAEHEKLILLAQLKPEKDSDEAVTYSLGKFGQRALDFYSIHVTKESTHPVKPLAQIAGNRYASGPVGKALSDACMGTIASFLSKYQDIIIEHQKVVKGNQKRLESLRELAGKENLEYPSVTLPPQPHTKEGVDAYNEVIARVRMWVNLNLWQKLKLSRDDAKPLLRLKGFPSFPLVERQANEVDWWDMVCNVKKLINEKKEDGKVFWQNLAGYKRQEALRPYLSSEEDRKKGKKFARYQLGDLLLHLEKKHGEDWGKVYDEAWERIDKKVEGLSKHIKLEEERRSEDAQSKAALTDWLRAKASFVIEGLKEADKDEFCRCELKHQKWYGDLRGKPFAIEAENSILDISGFSKQYNCAFIWQKDGVKKLNLYLIINYFKGGKLRFKKIKPEAFEANRFYTVINKKSGEIVPMEVNFNFDDPNLIILPLAFGKRQGREFIWNDLLSLETGSLKLANGRVIEKTLYNRRTRQDEPALFVALTFERREVLDSSNIKPMNLIGVDRGENIPAVIALTDPEGCPLSRFKDSLGNPTHILRIGESYKEKQRTIQAKKEVEQRRAGGYSRKYASKAKNLADDMVRNTARDLLYYAVTQDAMLIFENLSRGFGRQGKRTFMAERQYTRMEDWLTAKLAYEGLPSKTYLSKTLAQYTSKTCSNCGFTITSADYDRVLEKLKKTATGWMTTINGKELKVEGQITYYNRYKRQNVVKDLSVELDRLSEESVNNDISSWTKGRSGEALSLLKKRFSHRPVQEKFVCLNCGFETHADEQAALNIARSWLFLRSQEYKKYQTNKTTGNTDKRAFVETWQSFYRKKLKEVWKPAV

SEQ ID NO: 759 - protein, 978 aa, Artificial Sequence
  CasX Variant
QEIKRINKIRRRLVKDSNTKKAGKTGPMKTLLVRVMTPDLRERLENLRKKPENIPQPISNTSRANLNKLLTDYTEMKKAILHVYWEEFQKDPVGLMSRVAQPASKKIDQNKLKPEMDEKGNLTTAGFACSQCGQPLFVYKLEQVSEKGKAYTNYFGRCNVAEHEKLILLAQLKPEKDSDEAVTYSLGKFGQRALDFYSIHVTKESTHPVKPLAQIAGNRYASGPVGKALSDACMGTIASFLSKYQDIIIEHQKVVKGNQKRLESLRELAGKENLEYPSVTLPPQPHTKEGVDAYNEVIARVRMWVNLNLWQKLKLSRDDAKPLLRLKGFPSFPLVERQANEVDWWDMVCNVKKLINEKKEDGKVFWQNLAGYKRQEALRPYLSSEEDRKKGKKFARYQLGDLLLHLEKKHGEDWGKVYDEAWERIDKKVEGLSKHIKLEEERRSEDAQSKAALTDWLRAKASFVIEGLKEADKDEFCRCELKLQPWYGDLRGKPFAIEAENSILDISGFSKQYNCAFIWQKDGVKKLNLYLIINYFKGGKLRFKKIKPEAFEANRFYTVINKKSGEIVPMEVNFNFDDPNLIILPLAFGKRQGREFIWNDLLSLETGSLKLANGRVIEKTLYNRRTRQDEPALFVALTFERREVLDSSNIKPMNLIGVDRGENIPAVIALTDPEGCPLSRFKDSLGNPTHILRIGESYKEKQRTIQAKKEVEQRRAGGYSRKYASKAKNLADDMVRNTARDLLYYAVTQDAMLIFENLSRGFGRQGKRTFMAERQYTRMEDWLTAKLAYEGLPSKTYLSKTLAQYTSKTCSNCGFTITSADYDRVLEKLKKTATGWMTTINGKELKVEGQITYYNRYKRQNVVKDLSVELDRLSEESVNNDISSWTKGRSGEALSLLKKRFSHRPVQEKFVCLNCGFETHADEQAALNIARSWLFLRSQEYKKYQTNKTTGNTDKRAFVETWQSFYRKKLKEVWKPAV

SEQ ID NO: 760 - protein, 978 aa, Artificial Sequence; identical to SEQ ID NO: 672
  CasX Variant

SEQ ID NO: 761 - protein, 978 aa, Artificial Sequence
  CasX Variant
QEIKRINKIRRRLVKDSNTKKAGKTGPMKTLLVRVMTPDLRERLENLRKKPENIPQPISNTSRANLNKLLTDYTEMKKAILHVYWEEFQKDPVGLMSRVAQPASKKIDQNKLKPEMDEKGNLTTAGFACSQCGQPLFVYKLEQVSEKGKAYTNYFGRCNVAEHEKLILLAQLKPEKDSDEAVTYSLGKFGQRALDFYSIHVTKESTHPVKPLAQIAGNRYASGPVGKALSDACMGTIASFLSKYQDIIIEHQKVVKGNQKRLESLRELAGKENLEYPSVTLPPQPHTKEGVDAYNEVIARVRMWVNLNLWQKLKLSRDDAKPLLRLKGFPSFPLVERQANEVDWWDMVCNVKKLINEKKEDGKVFWQNLAGYKRQEALRPYLSSEEDRKKGKKFARYQLGDLLLHLEKKHGEDWGKVYDEAWERIDKKVEGLSKHIKLEEERRSEDAQSKAALTDWLRAKASFVIEGLKEADKDEFCRCELKLQKWYGDLRGKPFAIEAENSILDISGFSKQYNCAFIWQKDGVKKLNLYLIINYFKGGKLRFKKIKPEAFEANRFYTVINKKSGEIVPMEVNFNFDDPNLIILPLAFGKRFGREFIWNDLLSLETGSLKLANGRVIEKTLYNRRTRQDEPALFVALTFERREVLDSSNIKPMNLIGVDRGENIPAVIALTDPEGCPLSRFKDSLGNPTHILRIGESYKEKQRTIQAKKEVEQRRAGGYSRKYASKAKNLADDMVRNTARDLLYYAVTQDAMLIFENLSRGFGRQGKRTFMAERQYTRMEDWLTAKLAYEGLPSKTYLSKTLAQYTSKTCSNCGFTITSADYDRVLEKLKKTATGWMTTINGKELKVEGQITYYNRYKRQNVVKDLSVELDRLSEESVNNDISSWTKGRSGEALSLLKKRFSHRPVQEKFVCLNCGFETHADEQAALNIARSWLFLRSQEYKKYQTNKTTGNTDKRAFVETWQSFYRKKLKEVWKPAV

SEQ ID NO: 762 - protein, 978 aa, Artificial Sequence
  CasX Variant
QEIKRINKIRRRLVKDSNTKKAGKTGPMKTLLVRVMTPDLRERLENLRKKPENIPQPISNTSRANLNKLLTDYTEMKKAILHVYWEEFQKDPVGLMSRVAQPASKKIDQNKLKPEMDEKGNLTTAGFACSQCGQPLFVYKLEQVSEKGKAYTNYFGRCNVAEHEKLILLAQLKPEKDSDEAVTYSLGKFGQRALDFYSIHVTKESTHPVKPLAQIAGNRYASGPVGKALSDACMGTIASFLSKYQDIIIEHQKVVKGNQKRLESLRELAGKENLEYPSVTLPPQPHTKEGVDAYNEVIARVRMWVNLNLWQKLKLSRDDAKPLLRLKGFPSFPLVERQANEVDWWDMVCNVKKLINEKKEDGKVFWQNLAGYKRQEALRPYLSSEEDRKKGKKFARYQLGDLLLHLEKKHGEDWGKVYDEAWERIDKKVEGLSKHIKLEEERRSEDAQSKAALTDWLRAKASFVIEGLKEADKDEFCRCELKLQKWYGDLRGKPFAIEAENSILDISGFSKQYNCAFIWQKDGVKKLNLYLIINYFKGGKLRFKKIKPEAFEANRFYTVINKKSGEIVPMEVNFNFDDPNLIILPLAFGKRVGREFIWNDLLSLETGSLKLANGRVIEKTLYNRRTRQDEPALFVALTFERREVLDSSNIKPMNLIGVDRGENIPAVIALTDPEGCPLSRFKDSLGNPTHILRIGESYKEKQRTIQAKKEVEQRRAGGYSRKYASKAKNLADDMVRNTARDLLYYAVTQDAMLIFENLSRGFGRQGKRTFMAERQYTRMEDWLTAKLAYEGLPSKTYLSKTLAQYTSKTCSNCGFTITSADYDRVLEKLKKTATGWMTTINGKELKVEGQITYYNRYKRQNVVKDLSVELDRLSEESVNNDISSWTKGRSGEALSLLKKRFSHRPVQEKFVCLNCGFETHADEQAALNIARSWLFLRSQEYKKYQTNKTTGNTDKRAFVETWQSFYRKKLKEVWKPAV

SEQ ID NO: 763 - protein, 979 aa, Artificial Sequence
  CasX Variant
QEIKRINKIRRRLVKDSNTKKAGKTGPMKTLLVRVMTPDLRERLENLRKKPENIPQPISNTSRANLNKLLTDYTEMKKAILHVYWEEFQKDPVGLMSRVAQPASKKIDQNKLKPEMDEKGNLTTAGFACSQCGQPLFVYKLEQVSEKGKAYTNYFGRCNVAEHEKLILLAQLKPEKDSDEAVTYSLGKFGQRALDFYSIHVTKESTHPVKPLAQIAGNRYASGPVGKALSDACMGTIASFLSKYQDIIIEHQKVVKGNQKRLESLRELAGKENLEYPSVTLPPQPHTKEGVDAYNEVIARVRMWVNLNLWQKLKLSRDDAKPLLRLKGFPSFPLVERQANEVDWWDMVCNVKKLINEKKEDGKVFWQNLAGYKRQEALRPYLSSEEDRKKGKKFARYQLGDLLLHLEKKHGEDWGKVYDEAWERIDKKVEGLSKHIKLEEERRSEDAQSKAALTDWLRAKASFVIEGLKEADKDEFCRCELKLQKWYGDLRGKPFAIEAENSILDISGFSKQYNCAFIWQKDGVKKLNLYLIINYFKGGKLRFKKIKPEAFEANRFYTVINKKSGEIVPMEVNFNFDDPNLIILPLAFGKRQGREFIWNDLLSLETGSLKLANGRVIEKTLYNRRTRQDEPALFVALTFERREVLDSSNIIKPMNLIGVDRGENIPAVIALTDPEGCPLSRFKDSLGNPTHILRIGESYKEKQRTIQAKKEVEQRRAGGYSRKYASKAKNLADDMVRNTARDLLYYAVTQDAMLIFENLSRGFGRQGKRTFMAERQYTRMEDWLTAKLAYEGLPSKTYLSKTLAQYTSKTCSNCGFTITSADYDRVLEKLKKTATGWMTTINGKELKVEGQITYYNRYKRQNVVKDLSVELDRLSEESVNNDISSWTKGRSGEALSLLKKRFSHRPVQEKFVCLNCGFETHADEQAALNIARSWLFLRSQEYKKYQTNKTTGNTDKRAFVETWQSFYRKKLKEVWKPAV

SEQ ID NO: 764 - protein, 979 aa, Artificial Sequence
  CasX Variant
QEIKRINKIRRRLVKDSNTKKAGKTGPMKTLLVRVMTPDLRERLENLRKKPENIPQPISNTSRANLNKLLTDYTEMKKAILHVYWEEFQKDPVGLMSRVAQPASKKIDQNKLKPEMDEKGNLTTAGFACSQCGQPLFVYKLEQVSEKGKAYTNYFGRCNVAEHEKLILLAQLKPEKDSDEAVTYSLGKFGQRALDFYSIHVTKESTHPVKPLAQIAGNRYASGPVGKALSDACMGTIASFLSKYQDIIIEHQKVVKGNQKRLESLRELAGKENLEYPSVTLPPQPHTKEGVDAYNEVIARVRMWVNLNLWQKLKLSRDDAKPLLRLKGFPSFPLVERQANEVDWWDMVCNVKKLINEKKEDGKVFWQNLAGYKRQEALRPYLSSEEDRKKGKKFARYQLGDLLLHLEKKHGEDWGKVYDEAWERIDKKVEGLSKHIKLEEERRSEDAQSKAALTDWLRAKASFVIEGLKEADKDEFCRCELKLQKWYGDLRGKPFAIEAENSILDISGFSKQYNCAFIWQKDGVKKLNLYLIINYFKGGKLRFKKIKPEAFEANRFYTVINKKSGEIVPMEVNFNFDDPNLIILPLAFGKRQGREFIWNDLLSLETGSLKLANGRVIEKTLYNRRTRQDEPALFVALTFERREVLDSSNIKTPMNLIGVDRGENIPAVIALTDPEGCPLSRFKDSLGNPTHILRIGESYKEKQRTIQAKKEVEQRRAGGYSRKYASKAKNLADDMVRNTARDLLYYAVTQDAMLIFENLSRGFGRQGKRTFMAERQYTRMEDWLTAKLAYEGLPSKTYLSKTLAQYTSKTCSNCGFTITSADYDRVLEKLKKTATGWMTTINGKELKVEGQITYYNRYKRQNVVKDLSVELDRLSEESVNNDISSWTKGRSGEALSLLKKRFSHRPVQEKFVCLNCGFETHADEQAALNIARSWLFLRSQEYKKYQTNKTTGNTDKRAFVETWQSFYRKKLKEVWKPAV

SEQ ID NO: 765 - protein, 979 aa, Artificial Sequence
  CasX Variant
QEIKRINKIRRRLVKDSNTKKAGKTGPMKTLLVRVMTPDLRERLENLRKKPENIPQPISNTSRANLNKLLTDYTEMKKAILHVYWEEFQKDPVGLMSRVAQPASKKIDQNKLKPEMDEKGNLTTAGFACSQCGQPLFVYKLEQVSEKGKAYTNYFGRCNVAEHEKLILLAQLKPEKDSDEAVTYSLGKFGQRALDFYSIHVTKESTHPVKPLAQIAGNRYASGPVGKALSDACMGTIASFLSKYQDIIIEHQKVVKGNQKRLESLRELAGKENLEYPSVTLPPQPHTKEGVDAYNEVIARVRMWVNLNLWQKLKLSRDDAKPLLRLKGFPSFPLVERQANEVDWWDMVCNVKKLINEKKEDGKVFWQNLAGYKRQEALRPYLSSEEDRKKGKKFARYQLGDLLLHLEKKHGEDWGKVYDEAWERIDKKVEGLSKHIKLEEERRSEDAQSKAALTDWLRAKASFVIEGLKEADKDEFCRCELKLQKWYGDLRGKPFAIEAENSILDISGFSKQYNCAFIWQKDGVKKLNLYLIINYFKGGKLRFKKIKPEAFEANRFYTVINKKSGEIVPMEVNFNFDDPNLIILPLAFGKRQGREFIWNDLLSLETGSLKLANGRVIEKTLYNRRTRQDEPALFVALTFERREVLDSSNIKNPMNLIGVDRGENIPAVIALTDPEGCPLSRFKDSLGNPTHILRIGESYKEKQRTIQAKKEVEQRRAGGYSRKYASKAKNLADDMVRNTARDLLYYAVTQDAMLIFENLSRGFGRQGKRTFMAERQYTRMEDWLTAKLAYEGLPSKTYLSKTLAQYTSKTCSNCGFTITSADYDRVLEKLKKTATGWMTTINGKELKVEGQITYYNRYKRQNVVKDLSVELDRLSEESVNNDISSWTKGRSGEALSLLKKRFSHRPVQEKFVCLNCGFETHADEQAALNIARSWLFLRSQEYKKYQTNKTTGNTDKRAFVETWQSFYRKKLKEVWKPAV

SEQ ID NO: 766 - protein, 979 aa, Artificial Sequence
  CasX Variant
QEIKRINKIRRRLVKDSNTKKAGKTGPMKTLLVRVMTPDLRERLENLRKKPENIPQPISNTSRANLNKLLTDYTEMKKAILHVYWEEFQKDPVGLMSRVAQPASKKIDQNKLKPEMDEKGNLTTAGFACSQCGQPLFVYKLEQVSEKGKAYTNYFGRCNVAEHEKLILLAQLKPEKDSDEAVTYSLGKFGQRALDFYSIHVTKESTHPVKPLAQIAGNRYASGPVGKALSDACMGTIASFLSKYQDIIIEHQKVVKGNQKRLESLRELAGKENLEYPSVTLPPQPHTKEGVDAYNEVIARVRMWVNLNLWQKLKLSRDDAKPLLRLKGFPSFPLVERQANEVDWWDMVCNVKKLINEKKEDGKVFWQNLAGYKRQEALRPYLSSEEDRKKGKKFARYQLGDLLLHLEKKHGEDWGKVYDEAWERIDKKVEGLSKHIKLEEERRSEDAQSKAALTDWLRAKASFVIEGLKEADKDEFCRCELKLQKWYGDLRGKPFAIEAENSILDISGFSKQYNCAFIWQKDGVKKLNLYLIINYFKGGKLRFKKIKPEAFEANRFYTVINKKSGEIVPMEVNFNFDDPNLIILPLAFGKRQGREFIWNDLLSLETGSLKLANGRVIEKTLYNRRTRQDEPALFVALTFERREVLDSSNIKPRMNLIGVDRGENIPAVIALTDPEGCPLSRFKDSLGNPTHILRIGESYKEKQRTIQAKKEVEQRRAGGYSRKYASKAKNLADDMVRNTARDLLYYAVTQDAMLIFENLSRGFGRQGKRTFMAERQYTRMEDWLTAKLAYEGLPSKTYLSKTLAQYTSKTCSNCGFTITSADYDRVLEKLKKTATGWMTTINGKELKVEGQITYYNRYKRQNVVKDLSVELDRLSEESVNNDISSWTKGRSGEALSLLKKRFSHRPVQEKFVCLNCGFETHADEQAALNIARSWLFLRSQEYKKYQTNKTTGNTDKRAFVETWQSFYRKKLKEVWKPAV

SEQ ID NO: 767 - protein, 979 aa, Artificial Sequence
  CasX Variant
QEIKRINKIRRRLVKDSNTKKAGKTGPMKTLLVRVMTPDLRERLENLRKKPENIPQPISNTSRANLNKLLTDYTEMKKAILHVYWEEFQKDPVGLMSRVAQPASKKIDQNKLKPEMDEKGNLTTAGFACSQCGQPLFVYKLEQVSEKGKAYTNYFGRCNVAEHEKLILLAQLKPEKDSDEAVTYSLGKFGQRALDFYSIHVTKESTHPVKPLAQIAGNRYASGPVGKALSDACMGTIASFLSKYQDIIIEHQKVVKGNQKRLESLRELAGKENLEYPSVTLPPQPHTKEGVDAYNEVIARVRMWVNLNLWQKLKLSRDDAKPLLRLKGFPSFPLVERQANEVDWWDMVCNVKKLINEKKEDGKVFWQNLAGYKRQEALRPYLSSEEDRKKGKKFARYQLGDLLLHLEKKHGEDWGKVYDEAWERIDKKVEGLSKHIKLEEERRSEDAQSKAALTDWLRAKASFVIEGLKEADKDEFCRCELKLQKWYGDLRGKPFAIEAENSILDISGFSKQYNCAFIWQKDGVKKLNLYLIINYFKGGKLRFKKIKPEAFEANRFYTVINKKSGEIVPMEVNFNFDDPNLIILPLAFGKRQGREFIWNDLLSLETGSLKLANGRVIEKTLYNRRTRQDEPALFVALTFERREVLDSSNIKPMSNLIGVDRGENIPAVIALTDPEGCPLSRFKDSLGNPTHILRIGESYKEKQRTIQAKKEVEQRRAGGYSRKYASKAKNLADDMVRNTARDLLYYAVTQDAMLIFENLSRGFGRQGKRTFMAERQYTRMEDWLTAKLAYEGLPSKTYLSKTLAQYTSKTCSNCGFTITSADYDRVLEKLKKTATGWMTTINGKELKVEGQITYYNRYKRQNVVKDLSVELDRLSEESVNNDISSWTKGRSGEALSLLKKRFSHRPVQEKFVCLNCGFETHADEQAALNIARSWLFLRSQEYKKYQTNKTTGNTDKRAFVETWQSFYRKKLKEVWKPAV

SEQ ID NO: 768 - protein, 978 aa, Artificial Sequence
  CasX Variant
QEIKRINKIRRRLVKDSNTKKAGKTGPMKTLLVRVMTPDLRERLENLRKKPENIPQPISNTSRANLNKLLTDYTEMKKAILHVYWEEFQKDPVGLMSRVAQPASKKIDQNKLKPEMDEKGNLTTAGFACSQCGQPLFVYKLEQVSEKGKAYTNYFGRCNVAEHEKLILLAQLKPEKDSDEAVTYSLGKFGQRALDFYSIHVTKESTHPVKPLAQIAGNRYASGPVGKALSDACMGTIASFLSKYQDIIIEHQKVVKGNQKRLESLRELAGKENLEYPSVTLPPQPHTKEGVDAYNEVIARVRMWVNLNLWQKLKLSRDDAKPLLRLKGFPSFPLVERQANEVDWWDMVCNVKKLINEKKEDGKVFWQNLAGYKRQEALRPYLSSEEDRKKGKKFARYQLGDLLLHLEKKHGEDWGKVYDEAWERIDKKVEGLSKHIKLEEERRSEDAQSKAALTDWLRAKASFVIEGLKEADKDEFCRCELKLQKWYGDLRGKPFAIEAENSILDISGFSKQYNCAFIWQKDGVKKLNLYLIINYFKGGKLRFKKIKPEAFEANRFYTVINKKSGEIVPMEVNFNFDDPNLIILPLAFGKRQGREFIWNDLLSLETGSLKLANGRVIEKTLYNRRTRQDEPALFVALTFERREVLDSSNIKPMNLIGVDRGENIPAVIALTDPEGCPLSRFKDSLGNPTHILRIWESYKEKQRTIQAKKEVEQRRAGGYSRKYASKAKNLADDMVRNTARDLLYYAVTQDAMLIFENLSRGFGRQGKRTFMAERQYTRMEDWLTAKLAYEGLPSKTYLSKTLAQYTSKTCSNCGFTITSADYDRVLEKLKKTATGWMTTINGKELKVEGQITYYNRYKRQNVVKDLSVELDRLSEESVNNDISSWTKGRSGEALSLLKKRFSHRPVQEKFVCLNCGFETHADEQAALNIARSWLFLRSQEYKKYQTNKTTGNTDKRAFVETWQSFYRKKLKEVWKPAV

SEQ ID NO: 769 - protein, 978 aa, Artificial Sequence
  CasX Variant
QEIKRINKIRRRLVKDSNTKKAGKTGPMKTLLVRVMTPDLRERLENLRKKPENIPQPISNTSRANLNKLLTDYTEMKKAILHVYWEEFQKDPVGLMSRVAQPASKKIDQNKLKPEMDEKGNLTTAGFACSQCGQPLFVYKLEQVSEKGKAYTNYFGRCNVAEHEKLILLAQLKPEKDSDEAVTYSLGKFGQRALDFYSIHVTKESTHPVKPLAQIAGNRYASGPVGKALSDACMGTIASFLSKYQDIIIEHQKVVKGNQKRLESLRELAGKENLEYPSVTLPPQPHTKEGVDAYNEVIARVRMWVNLNLWQKLKLSRDDAKPLLRLKGFPSFPLVERQANEVDWWDMVCNVKKLINEKKEDGKVFWQNLAGYKRQEALRPYLSSEEDRKKGKKFARYQLGDLLLHLEKKHGEDWGKVYDEAWERIDKKVEGLSKHIKLEEERRSEDAQSKAALTDWLRAKASFVIEGLKEADKDEFCRCELKLQKWYGDLRGKPFAIEAENSILDISGFSKQYNCAFIWQKDGVKKLNLYLIINYFKGGKLRFKKIKPEAFEANRFYTVINKKSGEIVPMEVNFNFDDPNLIILPLAFGKRQGREFIWNDLLSLETGSLKLANGRVIEKTLYNRRTRQDEPALFVALTFERREVLDSSNIKPMNLIGVDRGENIPAVIALTDPEGCPLSRFKDSLGNPTHILRIRESYKEKQRTIQAKKEVEQRRAGGYSRKYASKAKNLADDMVRNTARDLLYYAVTQDAMLIFENLSRGFGRQGKRTFMAERQYTRMEDWLTAKLAYEGLPSKTYLSKTLAQYTSKTCSNCGFTITSADYDRVLEKLKKTATGWMTTINGKELKVEGQITYYNRYKRQNVVKDLSVELDRLSEESVNNDISSWTKGRSGEALSLLKKRFSHRPVQEKFVCLNCGFETHADEQAALNIARSWLFLRSQEYKKYQTNKTTGNTDKRAFVETWQSFYRKKLKEVWKPAV

SEQ ID NO: 770 - protein, 978 aa, Artificial Sequence
  CasX Variant
QEIKRINKIRRRLVKDSNTKKAGKTGPMKTLLVRVMTPDLRERLENLRKKPENIPQPISNTSRANLNKLLTDYTEMKKAILHVYWEEFQKDPVGLMSRVAQPASKKIDQNKLKPEMDEKGNLTTAGFACSQCGQPLFVYKLEQVSEKGKAYTNYFGRCNVAEHEKLILLAQLKPEKDSDEAVTYSLGKFGQRALDFYSIHVTKESTHPVKPLAQIAGNRYASGPVGKALSDACMGTIASFLSKYQDIIIEHQKVVKGNQKRLESLRELAGKENLEYPSVTLPPQPHTKEGVDAYNEVIARVRMWVNLNLWQKLKLSRDDAKPLLRLKGFPSFPLVERQANEVDWWDMVCNVKKLINEKKEDGKVFWQNLAGYKRQEALRPYLSSEEDRKKGKKFARYQLGDLLLHLEKKHGEDWGKVYDEAWERIDKKVEGLSKHIKLEEERRSEDAQSKAALTDWLRAKASFVIEGLKEADKDEFCRCELKLQKWYGDLRGKPFAIEAENSILDISGFSKQYNCAFIWQKDGVKKLNLYLIINYFKGGKLRFKKIKPEAFEANRFYTVINKKSGEIVPMEVNFNFDDPNLIILPLAFGKRQGREFIWNDLLSLETGSLKLANGRVIEKTLYNRRTRQDEPALFVALTFERREVLDSSNIKPMNLIGVDRGENIPAVIALTDPEGCPLSRFKDSLGNPTHILRIGESYKEKQRTIQASKEVEQRRAGGYSRKYASKAKNLADDMVRNTARDLLYYAVTQDAMLIFENLSRGFGRQGKRTFMAERQYTRMEDWLTAKLAYEGLPSKTYLSKTLAQYTSKTCSNCGFTITSADYDRVLEKLKKTATGWMTTINGKELKVEGQITYYNRYKRQNVVKDLSVELDRLSEESVNNDISSWTKGRSGEALSLLKKRFSHRPVQEKFVCLNCGFETHADEQAALNIARSWLFLRSQEYKKYQTNKTTGNTDKRAFVETWQSFYRKKLKEVWKPAV

SEQ ID NO: 771 - protein, 978 aa, Artificial Sequence
  CasX Variant
QEIKRINKIRRRLVKDSNTKKAGKTGPMKTLLVRVMTPDLRERLENLRKKPENIPQPISNTSRANLNKLLTDYTEMKKAILHVYWEEFQKDPVGLMSRVAQPASKKIDQNKLKPEMDEKGNLTTAGFACSQCGQPLFVYKLEQVSEKGKAYTNYFGRCNVAEHEKLILLAQLKPEKDSDEAVTYSLGKFGQRALDFYSIHVTKESTHPVKPLAQIAGNRYASGPVGKALSDACMGTIASFLSKYQDIIIEHQKVVKGNQKRLESLRELAGKENLEYPSVTLPPQPHTKEGVDAYNEVIARVRMWVNLNLWQKLKLSRDDAKPLLRLKGFPSFPLVERQANEVDWWDMVCNVKKLINEKKEDGKVFWQNLAGYKRQEALRPYLSSEEDRKKGKKFARYQLGDLLLHLEKKHGEDWGKVYDEAWERIDKKVEGLSKHIKLEEERRSEDAQSKAALTDWLRAKASFVIEGLKEADKDEFCRCELKLQKWYGDLRGKPFAIEAENSILDISGFSKQYNCAFIWQKDGVKKLNLYLIINYFKGGKLRFKKIKPEAFEANRFYTVINKKSGEIVPMEVNFNFDDPNLIILPLAFGKRQGREFIWNDLLSLETGSLKLANGRVIEKTLYNRRTRQDEPALFVALTFERREVLDSSNIKPMNLIGVDRGENIPAVIALTDPEGCPLSRFKDSLGNPTHILRIGESYKEKQRTIQAKKEVEQRRAGGYSRKYASKAKNLADDMVHNTARDLLYYAVTQDAMLIFENLSRGFGRQGKRTFMAERQYTRMEDWLTAKLAYEGLPSKTYLSKTLAQYTSKTCSNCGFTITSADYDRVLEKLKKTATGWMTTINGKELKVEGQITYYNRYKRQNVVKDLSVELDRLSEESVNNDISSWTKGRSGEALSLLKKRFSHRPVQEKFVCLNCGFETHADEQAALNIARSWLFLRSQEYKKYQTNKTTGNTDKRAFVETWQSFYRKKLKEVWKPAV

SEQ ID NO: 772 - protein, 978 aa, Artificial Sequence
  CasX Variant
QEIKRINKIRRRLVKDSNTKKAGKTGPMKTLLVRVMTPDLRERLENLRKKPENIPQPISNTSRANLNKLLTDYTEMKKAILHVYWEEFQKDPVGLMSRVAQPASKKIDQNKLKPEMDEKGNLTTAGFACSQCGQPLFVYKLEQVSEKGKAYTNYFGRCNVAEHEKLILLAQLKPEKDSDEAVTYSLGKFGQRALDFYSIHVTKESTHPVKPLAQIAGNRYASGPVGKALSDACMGTIASFLSKYQDIIIEHQKVVKGNQKRLESLRELAGKENLEYPSVTLPPQPHTKEGVDAYNEVIARVRMWVNLNLWQKLKLSRDDAKPLLRLKGFPSFPLVERQANEVDWWDMVCNVKKLINEKKEDGKVFWQNLAGYKRQEALRPYLSSEEDRKKGKKFARYQLGDLLLHLEKKHGEDWGKVYDEAWERIDKKVEGLSKHIKLEEERRSEDAQSKAALTDWLRAKASFVIEGLKEADKDEFCRCELKLQKWYGDLRGKPFAIEAENSILDISGFSKQYNCAFIWQKDGVKKLNLYLIINYFKGGKLRFKKIKPEAFEANRFYTVINKKSGEIVPMEVNFNFDDPNLIILPLAFGKRQGREFIWNDLLSLETGSLKLANGRVIEKTLYNRRTRQDEPALFVALTFERREVLDSSNIKPMNLIGVDRGENIPAVIALTDPEGCPLSRFKDSLGNPTHILRIGESYKEKQRTIQAKKEVEQRRAGGYSRKYASKAKNLADDMVRNTARDLLYYAVTQDAMLIFENLSRGFGRQGKRTFSAERQYTRMEDWLTAKLAYEGLPSKTYLSKTLAQYTSKTCSNCGFTITSADYDRVLEKLKKTATGWMTTINGKELKVEGQITYYNRYKRQNVVKDLSVELDRLSEESVNNDISSWTKGRSGEALSLLKKRFSHRPVQEKFVCLNCGFETHADEQAALNIARSWLFLRSQEYKKYQTNKTTGNTDKRAFVETWQSFYRKKLKEVWKPAV

SEQ ID NO: 773 - protein, 978 aa, Artificial Sequence
  CasX Variant
QEIKRINKIRRRLVKDSNTKKAGKTGPMKTLLVRVMTPDLRERLENLRKKPENIPQPISNTSRANLNKLLTDYTEMKKAILHVYWEEFQKDPVGLMSRVAQPASKKIDQNKLKPEMDEKGNLTTAGFACSQCGQPLFVYKLEQVSEKGKAYTNYFGRCNVAEHEKLILLAQLKPEKDSDEAVTYSLGKFGQRALDFYSIHVTKESTHPVKPLAQIAGNRYASGPVGKALSDACMGTIASFLSKYQDIIIEHQKVVKGNQKRLESLRELAGKENLEYPSVTLPPQPHTKEGVDAYNEVIARVRMWVNLNLWQKLKLSRDDAKPLLRLKGFPSFPLVERQANEVDWWDMVCNVKKLINEKKEDGKVFWQNLAGYKRQEALRPYLSSEEDRKKGKKFARYQLGDLLLHLEKKHGEDWGKVYDEAWERIDKKVEGLSKHIKLEEERRSEDAQSKAALTDWLRAKASFVIEGLKEADKDEFCRCELKLQKWYGDLRGKPFAIEAENSILDISGFSKQYNCAFIWQKDGVKKLNLYLIINYFKGGKLRFKKIKPEAFEANRFYTVINKKSGEIVPMEVNFNFDDPNLIILPLAFGKRQGREFIWNDLLSLETGSLKLANGRVIEKTLYNRRTRQDEPALFVALTFERREVLDSSNIKPMNLIGVDRGENIPAVIALTDPEGCPLSRFKDSLGNPTHILRIGESYKEKQRTIQAKKEVEQRRAGGYSRKYASKAKNLADDMVRNTARDLLYYAVTQDAMLIFENLSRGFGRQGKRTFAAERQYTRMEDWLTAKLAYEGLPSKTYLSKTLAQYTSKTCSNCGFTITSADYDRVLEKLKKTATGWMTTINGKELKVEGQITYYNRYKRQNVVKDLSVELDRLSEESVNNDISSWTKGRSGEALSLLKKRFSHRPVQEKFVCLNCGFETHADEQAALNIARSWLFLRSQEYKKYQTNKTTGNTDKRAFVETWQSFYRKKLKEVWKPAV

SEQ ID NO: 774 - protein, 978 aa, Artificial Sequence
  CasX Variant
QEIKRINKIRRRLVKDSNTKKAGKTGPMKTLLVRVMTPDLRERLENLRKKPENIPQPISNTSRANLNKLLTDYTEMKKAILHVYWEEFQKDPVGLMSRVAQPASKKIDQNKLKPEMDEKGNLTTAGFACSQCGQPLFVYKLEQVSEKGKAYTNYFGRCNVAEHEKLILLAQLKPEKDSDEAVTYSLGKFGQRALDFYSIHVTKESTHPVKPLAQIAGNRYASGPVGKALSDACMGTIASFLSKYQDIIIEHQKVVKGNQKRLESLRELAGKENLEYPSVTLPPQPHTKEGVDAYNEVIARVRMWVNLNLWQKLKLSRDDAKPLLRLKGFPSFPLVERQANEVDWWDMVCNVKKLINEKKEDGKVFWQNLAGYKRQEALRPYLSSEEDRKKGKKFARYQLGDLLLHLEKKHGEDWGKVYDEAWERIDKKVEGLSKHIKLEEERRSEDAQSKAALTDWLRAKASFVIEGLKEADKDEFCRCELKLQKWYGDLRGKPFAIEAENSILDISGFSKQYNCAFIWQKDGVKKLNLYLIINYFKGGKLRFKKIKPEAFEANRFYTVINKKSGEIVPMEVNFNFDDPNLIILPLAFGKRQGREFIWNDLLSLETGSLKLANGRVIEKTLYNRRTRQDEPALFVALTFERREVLDSSNIKPMNLIGVDRGENIPAVIALTDPEGCPLSRFKDSLGNPTHILRIGESYKEKQRTIQAKKEVEQRRAGGYSRKYASKAKNLADDMVRNTARDLLYYAVTQDAMLIFENLSRGFGRQGKRTFMAERQYTRMEDWLTAKLAYEGLPSKTYLSKTLAQYTSKTCSNCGFTITSADYDRVLEKLKKTATGWMTTINGKELKVEGQITYYNRYKRQNVVKDLSVELDRLSEESVNNDISSWDKGRSGEALSLLKKRFSHRPVQEKFVCLNCGFETHADEQAALNIARSWLFLRSQEYKKYQTNKTTGNTDKRAFVETWQSFYRKKLKEVWKPAV

SEQ ID NO: 775 - protein, 979 aa, Artificial Sequence
  CasX Variant
QEIKRINKIRRRLVKDSNTKKAGKTGPMKTLLVRVMTPDLRERLENLRKKPENIPQPISNTSRANLNKLLTDYTEMKKAILHVYWEEFQKDPVGLMSRVAQPASKKIDQNKLKPEMDEKGNLTTAGFACSQCGQPLFVYKLEQVSEKGKAYTNYFGRCNVAEHEKLILLAQLKPEKDSDEAVTYSLGKFGQRALDFYSIHVTKESTHPVKPLAQIAGNRYASGPVGKALSDACMGTIASFLSKYQDIIIEHQKVVKGNQKRLESLRELAGKENLEYPSVTLPPQPHTKEGVDAYNEVIARVRMWVNLNLWQKLKLSRDDAKPLLRLKGFPSFPLVERQANEVDWWDMVCNVKKLINEKKEDGKVFWQNLAGYKRQEALRPYLSSEEDRKKGKKFARYQLGDLLLHLEKKHGEDWGKVYDEAWERIDKKVEGLSKHIKLEEERRSEDAQSKAALTDWLRAKASFVIEGLKEADKDEFCRCELKLQKWYGDLRGKPFAIEAENSILDISGFSKQYNCAFIWQKDGVKKLNLYLIINYFKGGKLRFKKIKPEAFEANRFYTVINKKSGEIVPMEVNFNFDDPNLIILPLAFGKRQGREFIWNDLLSLETGSLKLANGRVIEKTLYNRRTRQDEPALFVALTFERREVLDSSNIKPMNLIGVDRGENIPAVIALTDPEGCPLSRFKDSLGNPTHILRIGESYKEKQRTIQAKKEVEQRRAGGYSRKYASKAKNLADDMVRNTARDLLYYAVTQDAMLIFENLSRGFGRQGKRTFMAERQYTRMEDWLTAKLAYEGLPSKTYLSKTLAQYTSKTCSNCGFTITSADYDRVLEKLKKTATGWMTTINGKELKVEGQITYYNRYKRQNVVKDLSVELDRLSEESVNNDISSWTKGRSGNEALSLLKKRFSHRPVQEKFVCLNCGFETHADEQAALNIARSWLFLRSQEYKKYQTNKTTGNTDKRAFVETWQSFYRKKLKEVWKPAV

SEQ ID NO: 776 - protein, 978 aa, Artificial Sequence
  CasX Variant
QEIKRINKIRRRLVKDSNTKKAGKTGPMKTLLVRVMTPDLRERLENLRKKPENIPQPISNTSRANLNKLLTDYTEMKKAILHVYWEEFQKDPVGLMSRVAQPASKKIDQNKLKPEMDEKGNLTTAGFACSQCGQPLFVYKLEQVSEKGKAYTNYFGRCNVAEHEKLILLAQLKPEKDSDEAVTYSLGKFGQRALDFYSIHVTKESTHPVKPLAQIAGNRYASGPVGKALSDACMGTIASFLSKYQDIIIEHQKVVKGNQKRLESLRELAGKENLEYPSVTLPPQPHTKEGVDAYNEVIARVRMWVNLNLWQKLKLSRDDAKPLLRLKGFPSFPLVERQANEVDWWDMVCNVKKLINEKKEDGKVFWQNLAGYKRQEALRPYLSSEEDRKKGKKFARYQLGDLLLHLEKKHGEDWGKVYDEAWERIDKKVEGLSKHIKLEEERRSEDAQSKAALTDWLRAKASFVIEGLKEADKDEFCRCELKLQKWYGDLRGKPFAIEAENSILDISGFSKQYNCAFIWQKDGVKKLNLYLIINYFKGGKLRFKKIKPEAFEANRFYTVINKKSGEIVPMEVNFNFDDPNLIILPLAFGKRQGREFIWNDLLSLETGSLKLANGRVIEKTLYNRRTRQDEPALFVALTFERREVLDSSNIKPMNLIGVDRGENIPAVIALTDPEGCPLSRFKDSLGNPTHILRIGESYKEKQRTIQAKKEVEQRRAGGYSRKYASKAKNLADDMVRNTARDLLYYAVTQDAMLIFENLSRGFGRQGKRTFMAERQYTRMEDWLTAKLAYEGLPSKTYLSKTLAQYTSKTCSNCGFTITSADYDRVLEKLKKTATGWMTTINGKELKVEGQITYYNRYKRQNVVKDLSVELDRLSEESVNNDISSWTKGRSGEALSLLKKRFSHRPVQEKFVCLNCGFETHADEQAALNIARVWLFLRSQEYKKYQTNKTTGNTDKRAFVETWQSFYRKKLKEVWKPAV

SEQ ID NO: 777 - protein, 978 aa, Artificial Sequence
  CasX Variant
QEIKRINKIRRRLVKDSNTKKAGKTGPMKTLLVRVMTPDLRERLENLRKKPENIPQPISNTSRANLNKLLTDYTEMKKAILHVYWEEFQKDPVGLMSRVAQPASKKIDQNKLKPEMDEKGNLTTAGFACSQCGQPLFVYKLEQVSEKGKAYTNYFGRCNVAEHEKLILLAQLKPEKDSDEAVTYSLGKFGQRALDFYSIHVTKESTHPVKPLAQIAGNRYASGPVGKALSDACMGTIASFLSKYQDIIIEHQKVVKGNQKRLESLRELAGKENLEYPSVTLPPQPHTKEGVDAYNEVIARVRMWVNLNLWQKLKLSRDDAKPLLRLKGFPSFPLVERQANEVDWWDMVCNVKKLINEKKEDGKVFWQNLAGYKRQEALRPYLSSEEDRKKGKKFARYQLGDLLLHLEKKHGEDWGKVYDEAWERIDKKVEGLSKHIKLEEERRSEDAQSKAALTDWLRAKASFVIEGLKEADKDEFCRCELKLQKWYGDLRGKPFAIEAENSILDISGFSKQYNCAFIWQKDGVKKLNLYLIINYFKGGKLRFKKIKPEAFEANRFYTVINKKSGEIVPMEVNFNFDDPNLIILPLAFGKRQGREFIWNDLLSLETGSLKLANGRVIEKTLYNRRTRQDEPALFVALTFERREVLDSSNIKPMNLIGVDRGENIPAVIALTDPEGCPLSRFKDSLGNPTHILRIGESYKEKQRTIQAKKEVEQRRAGGYSRKYASKAKNLADDMVRNTARDLLYYAVTQDAMLIFENLSRGFGRQGKRTFMAERQYTRMEDWLTAKLAYEGLPSKTYLSKTLAQYTSKTCSNCGFTITSADYDRVLEKLKKTATGWMTTINGKELKVEGQITYYNRYKRQNVVKDLSVELDRLSEESVNNDISSWTKGRSGEALSLLKKRFSHRPVQEKFVCLNCGFETHADEQAALNIARSWLFLRSQEYKKYQTNKTTINTDKRAFVETWQSFYRKKLKEVWKPAV

SEQ ID NO: 778 - protein, 977 aa, Artificial Sequence
  CasX Variant
QEIKRINKIRRRLVKDSNTKKAGKTGPMKTLLVRVMTPDLRERLENLRKKPENIPQPISNTSRANLNKLLTDYTEMKKAILHVYWEEFQKDPVGLMSRVAQPASKKIDQNKLKPEMDEKGNLTTAGFACSQCGQPLFVYKLEQVSEKGKAYTNYFGRCNVAEHEKLILLAQLKPEKDSDEAVTYSLGKFGQRALDFYSIHVTKESTHPVKPLAQIAGNRYASGPVGKALSDACMGTIASFLSKYQDIIIEHQKVVKGNQKRLESLRELAGKENLEYPSVTLPPQPHTKEGVDAYNEVIARVRMWVNLNLWQKLKLSRDDAKPLLRLKGFPSFPLVERQANEVDWWDMVCNVKKLINEKKEDGKVFWQNLAGYKRQEALRPYLSSPEDRKKGKKFARYQFGDLLLHLEKKHGEDWGKVYDEAWERIDKKVEGLSKHIKLEEERRSEDAQSKAALTDWLRAKASFVIEGLKEADKDEFCRCELKLQKWYGDLRGKPFAIEAENSILDISGFSKQYNCAFIWQKDGVKKLNLYLIINYFKGGKLRFKKIKPEAFEANRFYTVINKKSGEIVPMEVNFNFDDPNLIILPLAFGKRQGREFIWNDLLSLETGSLKLANGRVIEKTLYNRRTRQDEPALFVALTFERREVLDSSNIKPMNLIGVDRGENIPAVIALTDPEGCPLSRFKDSLGNPTHILRIGESYKEKQRTIQAKKEVEQRRAGGYSRKYASKAKNLANDMVRNTARDLLYYAVTQDAMLIFENLSRGFGRQGKRTFMAERQYTRMEDWLTAKLAYEGLSKTYLSKTLAQYTSKTCSNCGFTITSADYDRVLEKLKKTATGWMTTINGKELKVEGQITYYNRRKRQNVVKDLSVELDRLSEESVNNDISSWTKGRSGEALSLLKKRFSHRPVQEKFVCLNCGFETHADEQAALNIARSWLFLRSQEYKKYQTNKTTGNTDKRAFVETWQSFYRKKLKEVWKPAV

SEQ ID NO: 779 - protein, 977 aa, Artificial Sequence
  CasX Variant
QEIKRINKIRRRLVKDSNTKKAGKTGPMKTLLVRVMTPDLRERLENLRKKPENIPQPISNTSRANLNKLLTDYTEMKKAILHVYWEEFQKDPVGLMSRVAQPASKKIDQNKLKPEMDEKGNLTTAGFACSQCGQPLFVYKLEQVSEKGKAYTNYFGRCNVAEHEKLILLAQLKPEKDSDEAVTYSLGKFGQRALDFYSIHVTKESTHPVKPLAQIAGNRYASGPVGKALSDACMGTIASFLSKYQDIIIEHQKVVKGNQKRLESLRELAGKENLEYPSVTLPPQPHTKEGVDAYNEVIARVRMWVNLNLWQKLKLSRDDAKPLLRLKGFPSFPLVERQANEVDWWDMVCNVKKLINEKKEDGKVFWQNLAGYKRQEALRPYLSSEEDRKKGKKFARYQLGDLLLHLEKKHGEDWGKVYDEAWERIDKKVEGLSKHIKLEEERRSEDAQSKAALTDWLRAKASFVIEGLKEADKDEFSRCELKLQKWYGDLRGKPFAIEAENSILDISGFSKQYNCAFIWQKDGVKKLNLYLIINYFKGGKLRFKKIKPEAFEANRFYTVINKKSGEIVPMEVNFNFDDPNLIILPLAFGKRQGREFIWNDLLSLETGSLKLANGRVIEKTLYNRRTRQDEPALFVALTFERREVLDSSNIKPMNLIGVDRGENIPAVIALTDPEGCPLSRFKDSLGNPTHILRIGESYKEKQRTIQAKKEVEQRRAGGYSRKYASKAKNLADDMVRNTARDLLYYAVTQDAMLIFENLSRGFGRQGKRTFMAERQYTRMEDWLTAKLAYEGLSKTYLSKTLAQYTSKTCSNCGFTITSADYDRVLEKLKKTATGWMTTINGKELKVEGQITYYNRRKRQNVVKDLSVELDRLSEESVNNDISSWTKGRSGEALSLLKKRFSHRPVQEKFVCLNCGFETHADEQAALNIARSWLFLRSQEYKKYQTNKTTGNTDKRAFVETWQSFYRKKLKEVWKPAV

SEQ ID NO: 780 - protein, 977 aa, Artificial Sequence
  CasX Variant
QEIKRINKIRRRLVKDSNTKKAGKTGPMKTLLVRVMTPDLRERLENLRKKPENIPQPISNTSRANLNKLLTDYTEMKKAILHVYWEEFQKDPVGLMSRVAQPASKKIDQNKLKPEMDEKGNLTTAGFACSQCGQPLFVYKLEQVSEKGKAYTNYFGRCNVAEHEKLILLAQLKPEKDSDEAVTYSLGKFGQRALDFYSIHVTKESTHPVKPLAQIAGNRYASGPVGKALSDACMGTIASFLSKYQDIIIEHQKVVKGNQKRLESLRELAGKENLEYPSVTLPPQPHTKEGVDAYNEVIARVRMWVNLNLWQKLKLSRDDAKPLLRLKGFPSFPLVERQANEVDWWDMVCNVKKLINEKKEDGKVFWQNLAGYKRQEALRPYLSSENDRKKGKKFARYQFGDLLKHLEKKHGEDWGKVYDEAWERIDKKVEGLSKHIKLEEERRSEDAQSKAALTDWLRAKASFVIEGLKEADKDEFSRCELKLQKWYGDLRGKPFAIEAENSILDISGFSKQYNCAFIWQKDGVKKLNLYLIINYFKGGKLRFKKIKPEAFEANRFYTVINKKSGEIVPMEVNFNFDDPNLIILPLAFGKRQGREFIWNDLLSLETGSLKLANGRVIEKTLYNRRTRQDEPALFVALTFERREVLDSSNIKPMNLIGVDRGENIPAVIALTDPEGCPLSRFKDSLGNPTHILRIGESYKEKQRTIQAKKEVEQRRAGGYSRKYASKAKNLADDMVRNTARDLLYYAVTQDAMLIFENLSRGFGRQGKRTFMAERQYTRMEDWLTAKLAYEGLSKTLLSKTLAQYTSKTCSNCGFTITSADYDRVLEKLKKTATGWMTTINGKELKVEGQITYYNRRKRQNVVKDLSVELDRLSEESVNNDISSWTKGRSGEALSLLKKRFSHRPVQEKFVCLNCGFETHADEQAALNIARSWLFLRSQEYKKYQTNKTTGNTDKRAFVETWQSFYRKKLKEVWKPAV

SEQ ID NO: 781 - protein, 977 aa, Artificial Sequence
  CasX Variant
QEIKRINKIRRRLVKDSNTKKAGKTGPMKTLLVRVMTPDLRERLENLRKKPENIPQPISNTSRANLNKLLTDYTEMKKAILHVYWEEFQKDPVGLMSRVAQPASKKIDQNKLKPEMDEKGNLTTAGFACSQCGQPLFVYKLEQVSEKGKAYTNYFGRCNVAEHEKLILLAQLKPEKDSDEAVTYSLGKFGQRALDFYSIHVTKESTHPVKPLAQIAGNRYASGPVGKALSDACMGTIASFLSKYQDIIIEHQKVVKGNQKRLESLRELAGKENLEYPSVTLPPQPHTKEGVDAYNEVIARVRMWVNLNLWQKLKLSRDDAKPLLRLKGFPSFPLVERQANEVDWWDMVCNVKKLINEKKEDGKVFWQNLAGYKRQEALRPYLSSPEDRKKGKKFARYQLGDLLLHLEKKHGEDWGKVYDEAWERIDKKVEGLSKHIKLEEERRSEDAQSKAALTDWLRAKASFVIEGLKEADKDEFCRCELKLQKWYGDLRGKPFAIEAENSILDISGFSKQYNCAFIWQKDGVKKLNLYLIINYFKGGKLRFKKIKPEAFEANRFYTVINKKSGEIVPMEVNFNFDDPNLIILPLAFGKRQGREFIWNDLLSLETGSLKLANGRVIEKTLYNRRTRQDEPALFVALTFERREVLDSSNIKPMNLIGVDRGENIPAVIALTDPEGCPLSRFKDSLGNPTHILRIGESYKEKQRTIQAKKEVEQRRAGGYSRKYASKAKNLANDMVRNTARDLLYYAVTQDAMLIFENLSRGFGRQGKRTFMAERQYTRMEDWLTAKLAYEGLSKTYLSKTLAQYTSKTCSNCGFTITSADYDRVLEKLKKTATGWMTTINGKELKVEGQITYYNRRKRQNVVKDLSVELDRLSEESVNNDISSWTKGRSGEALSLLKKRFSHRPVQEKFVCLNCGFETHADEQAALNIARSWLFLRSQEYKKYQTNKTTGNTDKRAFVETWQSFYRKKLKEVWKPAV

SEQ ID NO: 782 - protein, 977 aa, Artificial Sequence
  CasX Variant
QEIKRINKIRRRLVKDSNTKKAGKTGPMKTLLVRVMTPDLRERLENLRKKPENIPQPISNTSRANLNKLLTDYTEMKKAILHVYWEEFQKDPVGLMSRVAQPASKKIDQNKLKPEMDEKGNLTTAGFACSQCGQPLFVYKLEQVSEKGKAYTNYFGRCNVAEHEKLILLAQLKPEKDSDEAVTYSLGKFGQRALDFYSIHVTKESTHPVKPLAQIAGNRYASGPVGKALSDACMGTIASFLSKYQDIIIEHQKVVKGNQKRLESLRELAGKENLEYPSVTLPPQPHTKEGVDAYNEVIARVRMWVNLNLWQKLKLSRDDAKPLLRLKGFPSFPLVERQANEVDWWDMVCNVKKLINEKKEDGKVFWQNLAGYKRQEALRPYLSSPEDRKKGKKFARYQLGDLLLHLEKKHGEDWGKVYDEAWERIDKKVEGLSKHIKLEEERRSEDAQSKAALTDWLRAKASFVIEGLKEADKDEFCRCELKLQKWYGDLRGKPFAIEAENSILDISGFSKQYNCAFIWQKDGVKKLNLYLIINYFKGGKLRFKKIKPEAFEANRFYTVINKKSGEIVPMEVNFNFDDPNLIILPLAFGKRQGREFIWNDLLSLETGSLKLANGRVIEKPLYNRRTRQDEPALFVALTFERREVLDSSNIKPMNLIGVDRGENIPAVIALTDPEGCPLSRFKDSLGNPTHILRIGESYKEKQRTIQAKKEVEQRRAGGYSRKYASKAKNLADDMVRNTARDLLYYAVTQDAMLIFENLSRGFGRQGKRTFMAERQYTRMEDWLTAKLAYEGLSKTYLSKTLAQYTSKTCSNCGFTITSADYDRVLEKLKKTATGWMTTINGKELKVEGQITYYNRRKRQNVVKDLSVELDRLSEESVNNDISSWTKGRSGEALSLLKKRFSHRPVQEKFVCLNCGFETHADEQAALNIARSWLFLRSQEYKKYQTNKTTGNTDKRAFVETWQSFYRKKLKEVWKPAV

SEQ ID NO: 783 - protein, 978 aa, Artificial Sequence
  CasX Variant
QEIKRINKIRRRLVKDSNTKKAGKTGPMKTLLVRVMTPDLRERLENLRKKPENIPQPISNTSRANLNKLLTDYTEMKKAILHVYWEEFQKDPVGLMSRVAQPASKKIDQNKLKPEMDEKGNLTTAGFACSQCGQPLFVYKLEQVSEKGKAYTNYFGRCNVAEHEKLILLAQLKPEKDSDEAVTYSLGKFGQRALDFYSIHVTKESTHPVKPLAQIAGNRYASGPVGKALSDACMGTIASFLSKYQDIIIEHQKVVKGNQKRLESLRELAGKENLEYPSVTLPPQPHTKEGVDAYNEVIARVRMWVNLNLWQKLKLSRDDAKPLLRLKGFPSFPLVERQANEVDWWDMVCNVKKLINEKKEDGKVFWQNLAGYKRQEALRPYLSSEEDRKKGKKFARYQLGDLLLHLEKKHGEDWGKVYDEAWERIDKKVEGLSKHIKLEEERRSEDAQSKAALTDWLRAKASFVIEGLKEADKDEFCRCELKLQKWYGDLRGKPFAIEAENSILDISGFSKQYNCAFIWQKDGVKKLNLYLIINYFKGGKLRFKKIKPEAFEANRFYTVINKKSGEIVPMEVNFNFDDPNLIILPLAFGKRQGREFIWNDLLSLETGSLKLANGRVIEKTLYNRRTRQDEPALFVALTFEDREVLDSSNIKPMNLIGVDRGENIPAVIALTDPEGCPLSRFKDSLGNPTHILRIGESYKEKQRTIQAKKEVEQRRAGGYSRKYASKAKNLADDMVRNTARDLLYYAVTQDAMLIFENLSRGFGRQGKRTFMAERQYTRMEDWLTAKLAYEGLPSKTYLSKTLAQYTSKTCSNCGFTITSADYDRVLEKLKKTATGWMTTINGKELKVEGQITYYNRYKRQNVVKDLSVELDRLSEESVNNDISSWTKGRSGEALSLLKKRFSHRPVQEKFVCLNCGFETHADEQAALNIARSWLFLRSQEYKKYQTNKTTGNTDKRAFVETWQSFYRKKLKEVWKPAV

SEQ ID NO: 784 - protein, 979 aa, Artificial Sequence
  CasX Variant
QEIKRINKIRRRLVKDSNTKKAGKTGPMKTLLVRVMTPDLRERLENLRKKPENIPQPISNTSRANLNKLLTDYTEMKKAILHVYWEEFQKDPVGLMSRVAQPASKKIDQNKLKPEMDEKGNLTTAGFACSQCGQPLFVYKLEQVSEKGKAYTNYFGRCNVAEHEKLILLAQLKPEKDSDEAVTYSLGKFGQRALDFYSIHVTKESTHPVKPLAQIAGNRYASGPVGKALSDACMGTIASFLSKYQDIIIEHQKVVKGNQKRLESLRELAGKENLEYPSVTLPPQPHTKEGVDAYNEVIARVRMWVNLNLWQKLKLSRDDAKPLLRLKGFPSFPLVERQANEVDWWDMVCNVKKLINEKKEDGKVFWQNLAGYKRQEALRPYLSSEEDRKKGKKFARYQLGDLLLHLEKKHGEDWGKVYDEAWERIDKKVEGLSKHIKLEEERRSEDAQSKAALTDWLRAKASFVIEGLKEADKDEFCRCELKLQKWYGDLRGKHPFAIEAENSILDISGFSKQYNCAFIWQKDGVKKLNLYLIINYFKGGKLRFKKIKPEAFEANRFYTVINKKSGEIVPMEVNFNFDDPNLIILPLAFGKRQGREFIWNDLLSLETGSLKLANGRVIEKTLYNRRTRQDEPALFVALTFERREVLDSSNIKPMNLIGVDRGENIPAVIALTDPEGCPLSRFKDSLGNPTHILRIGESYKEKQRTIQAKKEVEQRRAGGYSRKYASKAKNLADDMVRNTARDLLYYAVTQDAMLIFENLSRGFGRQGKRTFMAERQYTRMEDWLTAKLAYEGLPSKTYLSKTLAQYTSKTCSNCGFTITSADYDRVLEKLKKTATGWMTTINGKELKVEGQITYYNRYKRQNVVKDLSVELDRLSEESVNNDISSWTKGRSGEALSLLKKRFSHRPVQEKFVCLNCGFETHADEQAALNIARSWLFLRSQEYKKYQTNKTTGNTDKRAFVETWQSFYRKKLKEVWKPAV

SEQ ID NO: 785 - protein, 979 aa, Artificial Sequence
  CasX Variant
QEIKRINKIRRRLVKDSNTKKAGKTGPMKTLLVRVMTPDLRERLENLRKKPENIPQPISNTSRANLNKLLTDYTEMKKAILHVYWEEFQKDPVGLMSRVAQPASKKIDQNKLKPEMDEKGNLTTAGFACSQCGQPLFVYKLEQVSEKGKAYTNYFGRCNVAEHEKLILLAQLKPEKDSDEAVTYSLGKFGQRALDFYSIHVTKESTHPVKPLAQIAGNRYASGPVGKALSDACMGTIASFLSKYQDIIIEHQKVVKGNQKRLESLRELAGKENLEYPSVTLPPQPHTKEGVDAYNEVIARVRMWVNLNLWQKLKLSRDDAKPLLRLKGFPSFPLVERQANEVDWWDMVCNVKKLIINEKKEDGKVFWQNLAGYKRQEALRPYLSSEEDRKKGKKFARYQLGDLLLHLEKKHGEDWGKVYDEAWERIDKKVEGLSKHIKLEEERRSEDAQSKAALTDWLRAKASFVIEGLKEADKDEFCRCELKLQKWYGDLRGKPFAIEAENSILDISGFSKQYNCAFIWQKDGVKKLNLYLIINYFKGGKLRFKKIKPEAFEANRFYTVINKKSGEIVPMEVNFNFDDPNLIILPLAFGKRQGREFIWNDLLSLETGSLKLANGRVIEKTLYNRRTRQDEPALFVALTFERREVLDSSNIKPMNLIGVDRGENIPAVIALTDPEGCPLSRFKDSLGNPTHILRIGESYKEKQRTIQAKKEVEQRRAGGYSRKYASKAKNLADDMVRNTARDLLYYAVTQDAMLIFENLSRGFGRQGKRTFMAERQYTRMEDWLTAKLAYEGLPSKTYLSKTLAQYTSKTCSNCGFTITSADYDRVLEKLKKTATGWMTTINGKELKVEGQITYYNRYKRQNVVKDLSVELDRLSEESVNNDISSWTKGRSGEALSLLKKRFSHRPVQEKFVCLNCGFETHADEQAALNIARSWLFLRSQEYKKYQTNKTTGNTDKRAFVETWQSFYRKKLKEVWKPAV

SEQ ID NO: 786 - protein, 979 aa, Artificial Sequence
  CasX Variant
QEIKRINKIRRRLVKDSNTKKAGKTRGPMKTLLVRVMTPDLRERLENLRKKPENIPQPISNTSRANLNKLLTDYTEMKKAILHVYWEEFQKDPVGLMSRVAQPASKKIDQNKLKPEMDEKGNLTTAGFACSQCGQPLFVYKLEQVSEKGKAYTNYFGRCNVAEHEKLILLAQLKPEKDSDEAVTYSLGKFGQRALDFYSIHVTKESTHPVKPLAQIAGNRYASSPVGKALSDACMGTIASFLSKYQDIIIEHQKVVKGNQKRLESLRELAGKENLEYPSVTLPPQPHTKEGVDAYNEVIARVRMWVNLNLWQKLKLSRDDAKPLLRLKGFPSFPLVERQANEVDWWDMVCNVKKLINEKKEDGKVFWQNLAGYKRQEALRPYLSSEEDRKKGKKFARYQLGDLLLHLEKKHGEDWGKVYDEAWERIDKKVEGLSKHIKLEEERRSEDAQSKAALTDWLRAKASFVIEGLKEADKDEFCRCELKLQKWYGDLRGKPFAIEAENSILDISGFSKQYNCAFIWQKDGVKKLNLYLIINYFKGGKLRFKKIKPEAFEANRFYTVINKKSGEIVPMEVNFNFDDPNLIILPLAFGKRQGREFIWNDLLSLETGSLKLANGRVIEKTLYNRRTRQDEPALFVALTFERREVLDSSNIKPMNLIGVDRGENIPAVIALTDPEGCPLSRFKDSLGNPTHILRIGESYKEKQRTIQAKKEVEQRRAGGYSRKYASKAKNLADDMVRNTARDLLYYAVTQDAMLIFENLSRGFGRQGKRTFMAERQYTRMEDWLTAKLAYEGLPSKTYLSKTLAQYTSKTCSNCGFTITSADYDRVLEKLKKTATGWMTTINGKELKVEGQITYYNRYKRQNVVKDLSVELDRLSEESVNNDISSWTKGRSGEALSLLKKRFSHRPVQEKFVCLNCGFETHADEQAALNIARSWLFLRSQEYKKYQTNKTTGNTDKRAFVETWQSFYRKKLKEVWKPAV

SEQ ID NO: 787 - protein, 979 aa, Artificial Sequence
  CasX Variant
QEIKRINKIRRRLVKDSNTKKAGKTRGPMKTLLVRVMTPDLRERLENLRKKPENIPQPISNTSRANLNKLLTDYTEMKKAILHVYWEEFQKDPVGLMSRVAQPASKKIDQNKLKPEMDEKGNLTTAGFACSQCGQPLFVYKLEQVSEKGKAYTNYFGRCNVAEHEKLILLAQLKPEKDSDEAVTYSLGKFGQRALDFYSIHVTKESTHPVKPLAQIAGNRYASGPVGKALSGACMGTIASFLSKYQDIIIEHQKVVKGNQKRLESLRELAGKENLEYPSVTLPPQPHTKEGVDAYNEVIARVRMWVNLNLWQKLKLSRDDAKPLLRLKGFPSFPLVERQANEVDWWDMVCNVKKLINEKKEDGKVFWQNLAGYKRQEALRPYLSSEEDRKKGKKFARYQLGDLLLHLEKKHGEDWGKVYDEAWERIDKKVEGLSKHIKLEEERRSEDAQSKAALTDWLRAKASFVIEGLKEADKDEFCRCELKLQKWYGDLRGKPFAIEAENSILDISGFSKQYNCAFIWQKDGVKKLNLYLIINYFKGGKLRFKKIKPEAFEANRFYTVINKKSGEIVPMEVNFNFDDPNLIILPLAFGKRQGREFIWNDLLSLETGSLKLANGRVIEKTLYNRRTRQDEPALFVALTFERREVLDSSNIKPMNLIGVDRGENIPAVIALTDPEGCPLSRFKDSLGNPTHILRIGESYKEKQRTIQAKKEVEQRRAGGYSRKYASKAKNLADDMVRNTARDLLYYAVTQDAMLIFENLSRGFGRQGKRTFMAERQYTRMEDWLTAKLAYEGLPSKTYLSKTLAQYTSKTCSNCGFTITSADYDRVLEKLKKTATGWMTTINGKELKVEGQITYYNRYKRQNVVKDLSVELDRLSEESVNNDISSWTKGRSGEALSLLKKRFSHRPVQEKFVCLNCGFETHADEQAALNIARSWLFLRSQEYKKYQTNKTTGNTDKRAFVETWQSFYRKKLKEVWKPAV

SEQ ID NO: 788 - protein, 978 aa, Artificial Sequence
  CasX Variant
QEIKRINKIRRRLVKDSNTKKAGKTGPMKTLLVRVMTPDLRERLENLRKKPENIPQPISNTSRANLNKLLTDYTEMKKAILHVYWEEFQKDPVGLMSRVAQPASKKIDQNKLKPEMDEKGNLTTAGFACSQCGQPLFVYKLEQVSEKGKAYTNYFGRCNVAEHEKLILLAQLKPEKDSDEAVTYSLGKFGQRALDFYSIHVTKESTHPVKPLAQIAGNRYASGPVGKALSDACMGTIASFLSKYQDIIIEHQKVVKGNQKRLESLRELAGKENLEYPSVTLPPQPHTKEGVDAYNEVIARVRMWVNLNLWQKLKLSRDDAKPLLRLKGFPSFPLVERQANEVDWWDMVCNVKKLINEKKEDGKVFWQNLAGYKRQEALRPYLSSPEDRKKGKKFARYQFGDLLLHLEKKHGEDWGKVYDEAWERIDKKVEGLSKHIKLEEERRSEDAQSKAALTDWLRAKASFVIEGLKEADKDEFCRCELKLQKWYGDLRGKPFAIEAENSILDISGFSKQYNCAFIWQKDGVKKLNLYLIINYFKGGKLRFKKIKPEAFEANRFYTVINKKSGEIVPMEVNFNFDDPNLIILPLAFGKRQGREFIWNDLLSLETGSLKLANGRVIEKTLYNRRTRQDEPALFVALTFERREVLDSSNIKPMNLIGVDRGENIPAVIALTDPEGCPLSRFKDSLGNPTHILRIGESYKEKQRTIQAKKEVEQRRAGGYSRKYASKAKNLANDMVRNTARDLLYYAVTQDAMLIFENLSRGFGRQGKRTFMAERQYTRMEDWLTAKLAYEGLPSKTYLSKTLAQYTSKTCSNCGFTITSADYDRVLEKLKKTATGWMTTINGKELKVEGQITYYNRRKRQNVVKDLSVELDRLSEESVNNDISSWTKGRSGEALSLLKKRFSHRPVQEKFVCLNCGFETHADEQAALNIARSWLFLRSQEYKKYQTNKTTGNTDKRAFVETWQSFYRKKLKEVWKPAV

SEQ ID NO: 789 - protein, 978 aa, Artificial Sequence
  CasX Variant
QEIKRINKIRRRLVKDSNTKKAGKTGPMKTLLVRVMTPDLRERLENLRKKPENIPQPISNTSRANLNKLLTDYTEMKKAILHVYWEEFQKDPVGLMSRVAQPASKKIDQNKLKPEMDEKGNLTTAGFACSQCGQPLFVYKLEQVSEKGKAYTNYFGRCNVAEHEKLIKLAQLKPEKDSDEAVTYSLGKFGQRALDFYSIHVTKESTHPVKPLAQIAGNRYASSPVGKALSDACMGTIASFLSKYQDIIIEHQKVVKGNQKRLESLRELAGKENLEYPSVTLPPQPHTKEGVDAYNEVIARVRMWVNLNLWQKLKLSRDDAKPLLRLKGFPSFPLVERQANEVDWWDMVCNVKKLINEKKEDGKVFWQNLAGYKRQEALRPYLSSEEDRKKGKKFARYQLGDLLLHLEKKHGEDWGKVYDEAWERIDKKVEGLSKHIKLEEERRSEDAQSKAALTDWLRAKASFVIEGLKEADKDEFCRCELKLQKWYGDLRGKPFAIEAENSILDISGFSKQYNCAFIWQKDGVKKLNLYLIINYFKGGKLRFKKIKPEAFEANRFYTVINKKSGEIVPMEVNFNFDDPNLIILPLAFGKRQGREFIWNDLLSLETGSLKLANGRVIEKTLYNRRTRQDEPALFVALTFERREVLDSSNIKPMNLIGVDRGENIPAVIALTDPEGCPLSRFKDSLGNPTHILRIGESYKEKQRTIQAKKEVEQRRAGGYSRKYASKAKNLADDMVRNTARDLLYYAVTQDAMLIFENLSRGFGRQGKRTFMAERQYTRMEDWLTAKLAYEGLPSKTYLSKTLAQYTSKTCSNCGFTITSADYDRVLEKLKKTATGWMTTINGKELKVEGQITYYNRYKRQNVVKDLSVELDRLSEESVNNDISSWTKGRSGEALSLLKKRFSHRPVQEKFVCLNCGFETHADEQAALNIARSWLFLRSQEYKKYQTNKTTGNTDKRAFVETWQSFYRKKLKEVWKPAV

SEQ ID NO: 790 - protein, 978 aa, Artificial Sequence
  CasX Variant
QEIKRINKIRRRLVKDSNTKKAGKTGPMKTLLVRVMTPDLRERLENLRKKPENIPQPISNTSRANLNKLLTDYTEMKKAILHVYWEEFQKDPVGLMSRVAQPASKKIDQNKLKPEMDEKGNLTTAGFACSQCGQPLFVYKLEQVSEKGKAYTNYFGRCNVAEHEKLILLAQLKPEKDSDEAVTYSLGKFGQRALDFYSIHVTKESTHPVKPLAQIAGNRYASSPVGKALSGACMGTIASFLSKYQDIIIEHQKVVKGNQKRLESLRELAGKENLEYPSVTLPPQPHTKEGVDAYNEVIARVRMWVNLNLWQKLKLSRDDAKPLLRLKGFPSFPLVERQANEVDWWDMVCNVKKLINEKKEDGKVFWQNLAGYKRQEALRPYLSSEEDRKKGKKFARYQLGDLLLHLEKKHGEDWGKVYDEAWERIDKKVEGLSKHIKLEEERRSEDAQSKAALTDWLRAKASFVIEGLKEADKDEFCRCELKLQKWYGDLRGKPFAIEAENSILDISGFSKQYNCAFIWQKDGVKKLNLYLIINYFKGGKLRFKKIKPEAFEANRFYTVINKKSGEIVPMEVNFNFDDPNLIILPLAFGKRQGREFIWNDLLSLETGSLKLANGRVIEKTLYNRRTRQDEPALFVALTFERREVLDSSNIKPMNLIGVDRGENIPAVIALTDPEGCPLSRFKDSLGNPTHILRIGESYKEKQRTIQAKKEVEQRRAGGYSRKYASKAKNLADDMVRNTARDLLYYAVTQDAMLIFENLSRGFGRQGKRTFMAERQYTRMEDWLTAKLAYEGLPSKTYLSKTLAQYTSKTCSNCGFTITSADYDRVLEKLKKTATGWMTTINGKELKVEGQITYYNRYKRQNVVKDLSVELDRLSEESVNNDISSWTKGRSGEALSLLKKRFSHRPVQEKFVCLNCGFETHADEQAALNIARSWLFLRSQEYKKYQTNKTTGNTDKRAFVETWQSFYRKKLKEVWKPAV

SEQ ID NO: 791 - protein, 978 aa, Artificial Sequence
  CasX Variant
QEIKRINKIRRRLVKDSNTKKAGKTGPMKTLLVRVMTPDLRERLENLRKKPENIPQPISNTSRANLNKLLTDYTEMKKAILHVYWEEFQKDPVGLMSRVAQPASKKIDQNKLKPEMDEKGNLTTAGFACSQCGQPLFVYKLEQVSEKGKAYTNYFGRCNVAEHEKLIKLAQLKPEKDSDEAVTYSLGKFGQRALDFYSIHVTKESTHPVKPLAQIAGNRYASSPVGKALSGACMGTIASFLSKYQDIIIEHQKVVKGNQKRLESLRELAGKENLEYPSVTLPPQPHTKEGVDAYNEVIARVRMWVNLNLWQKLKLSRDDAKPLLRLKGFPSFPLVERQANEVDWWDMVCNVKKLINEKKEDGKVFWQNLAGYKRQEALRPYLSSEEDRKKGKKFARYQLGDLLLHLEKKHGEDWGKVYDEAWERIDKKVEGLSKHIKLEEERRSEDAQSKAALTDWLRAKASFVIEGLKEADKDEFCRCELKLQKWYGDLRGKPFAIEAENSILDISGFSKQYNCAFIWQKDGVKKLNLYLIINYFKGGKLRFKKIKPEAFEANRFYTVINKKSGEIVPMEVNFNFDDPNLIILPLAFGKRQGREFIWNDLLSLETGSLKLANGRVIEKTLYNRRTRQDEPALFVALTFERREVLDSSNIKPMNLIGVDRGENIPAVIALTDPEGCPLSRFKDSLGNPTHILRIGESYKEKQRTIQAKKEVEQRRAGGYSRKYASKAKNLADDMVRNTARDLLYYAVTQDAMLIFENLSRGFGRQGKRTFMAERQYTRMEDWLTAKLAYEGLPSKTYLSKTLAQYTSKTCSNCGFTITSADYDRVLEKLKKTATGWMTTINGKELKVEGQITYYNRYKRQNVVKDLSVELDRLSEESVNNDISSWTKGRSGEALSLLKKRFSHRPVQEKFVCLNCGFETHADEQAALNIARSWLFLRSQEYKKYQTNKTTGNTDKRAFVETWQSFYRKKLKEVWKPAV

SEQ ID NO: 792 - protein, 979 aa, Artificial Sequence
  CasX Variant
QEIKRINKIRRRLVKDSNTKKAGKTRGPMKTLLVRVMTPDLRERLENLRKKPENIPQPISNTSRANLNKLLTDYTEMKKAILHVYWEEFQKDPVGLMSRVAQPASKKIDQNKLKPEMDEKGNLTTAGFACSQCGQPLFVYKLEQVSEKGKAYTNYFGRCNVAEHEKLIKLAQLKPEKDSDEAVTYSLGKFGQRALDFYSIHVTKESTHPVKPLAQIAGNRYASGPVGKALSDACMGTIASFLSKYQDIIIEHQKVVKGNQKRLESLRELAGKENLEYPSVTLPPQPHTKEGVDAYNEVIARVRMWVNLNLWQKLKLSRDDAKPLLRLKGFPSFPLVERQANEVDWWDMVCNVKKLINEKKEDGKVFWQNLAGYKRQEALRPYLSSEEDRKKGKKFARYQLGDLLLHLEKKHGEDWGKVYDEAWERIDKKVEGLSKHIKLEEERRSEDAQSKAALTDWLRAKASFVIEGLKEADKDEFCRCELKLQKWYGDLRGKPFAIEAENSILDISGFSKQYNCAFIWQKDGVKKLNLYLIINYFKGGKLRFKKIKPEAFEANRFYTVINKKSGEIVPMEVNFNFDDPNLIILPLAFGKRQGREFIWNDLLSLETGSLKLANGRVIEKTLYNRRTRQDEPALFVALTFERREVLDSSNIKPMNLIGVDRGENIPAVIALTDPEGCPLSRFKDSLGNPTHILRIGESYKEKQRTIQAKKEVEQRRAGGYSRKYASKAKNLADDMVRNTARDLLYYAVTQDAMLIFENLSRGFGRQGKRTFMAERQYTRMEDWLTAKLAYEGLPSKTYLSKTLAQYTSKTCSNCGFTITSADYDRVLEKLKKTATGWMTTINGKELKVEGQITYYNRYKRQNVVKDLSVELDRLSEESVNNDISSWTKGRSGEALSLLKKRFSHRPVQEKFVCLNCGFETHADEQAALNIARSWLFLRSQEYKKYQTNKTTGNTDKRAFVETWQSFYRKKLKEVWKPAV

SEQ ID NO: 793 - protein, 979 aa, Artificial Sequence
  CasX Variant
QEIKRINKIRRRLVKDSNTKKAGKTRGPMKTLLVRVMTPDLRERLENLRKKPENIPQPISNTSRANLNKLLTDYTEMKKAILHVYWEEFQKDPVGLMSRVAQPASKKIDQNKLKPEMDEKGNLTTAGFACSQCGQPLFVYKLEQVSEKGKAYTNYFGRCNVAEHEKLIKLAQLKPEKDSDEAVTYSLGKFGQRALDFYSIHVTKESTHPVKPLAQIAGNRYASSPVGKALSDACMGTIASFLSKYQDIIIEHQKVVKGNQKRLESLRELAGKENLEYPSVTLPPQPHTKEGVDAYNEVIARVRMWVNLNLWQKLKLSRDDAKPLLRLKGFPSFPLVERQANEVDWWDMVCNVKKLINEKKEDGKVFWQNLAGYKRQEALRPYLSSEEDRKKGKKFARYQLGDLLLHLEKKHGEDWGKVYDEAWERIDKKVEGLSKHIKLEEERRSEDAQSKAALTDWLRAKASFVIEGLKEADKDEFCRCELKLQKWYGDLRGKPFAIEAENSILDISGFSKQYNCAFIWQKDGVKKLNLYLIINYFKGGKLRFKKIKPEAFEANRFYTVINKKSGEIVPMEVNFNFDDPNLIILPLAFGKRQGREFIWNDLLSLETGSLKLANGRVIEKTLYNRRTRQDEPALFVALTFERREVLDSSNIKPMNLIGVDRGENIPAVIALTDPEGCPLSRFKDSLGNPTHILRIGESYKEKQRTIQAKKEVEQRRAGGYSRKYASKAKNLADDMVRNTARDLLYYAVTQDAMLIFENLSRGFGRQGKRTFMAERQYTRMEDWLTAKLAYEGLPSKTYLSKTLAQYTSKTCSNCGFTITSADYDRVLEKLKKTATGWMTTINGKELKVEGQITYYNRYKRQNVVKDLSVELDRLSEESVNNDISSWTKGRSGEALSLLKKRFSHRPVQEKFVCLNCGFETHADEQAALNIARSWLFLRSQEYKKYQTNKTTGNTDKRAFVETWQSFYRKKLKEVWKPAV

SEQ ID NO: 794 - protein, 979 aa, Artificial Sequence
  CasX Variant
QEIKRINKIRRRLVKDSNTKKAGKTRGPMKTLLVRVMTPDLRERLENLRKKPENIPQPISNTSRANLNKLLTDYTEMKKAILHVYWEEFQKDPVGLMSRVAQPASKKIDQNKLKPEMDEKGNLTTAGFACSQCGQPLFVYKLEQVSEKGKAYTNYFGRCNVAEHEKLIKLAQLKPEKDSDEAVTYSLGKFGQRALDFYSIHVTKESTHPVKPLAQIAGNRYASSPVGKALSGACMGTIASFLSKYQDIIIEHQKVVKGNQKRLESLRELAGKENLEYPSVTLPPQPHTKEGVDAYNEVIARVRMWVNLNLWQKLKLSRDDAKPLLRLKGFPSFPLVERQANEVDWWDMVCNVKKLINEKKEDGKVFWQNLAGYKRQEALRPYLSSEEDRKKGKKFARYQLGDLLLHLEKKHGEDWGKVYDEAWERIDKKVEGLSKHIKLEEERRSEDAQSKAALTDWLRAKASFVIEGLKEADKDEFCRCELKLQKWYGDLRGKPFAIEAENSILDISGFSKQYNCAFIWQKDGVKKLNLYLIINYFKGGKLRFKKIKPEAFEANRFYTVINKKSGEIVPMEVNFNFDDPNLIILPLAFGKRQGREFIWNDLLSLETGSLKLANGRVIEKTLYNRRTRQDEPALFVALTFERREVLDSSNIKPMNLIGVDRGENIPAVIALTDPEGCPLSRFKDSLGNPTHILRIGESYKEKQRTIQAKKEVEQRRAGGYSRKYASKAKNLADDMVRNTARDLLYYAVTQDAMLIFENLSRGFGRQGKRTFMAERQYTRMEDWLTAKLAYEGLPSKTYLSKTLAQYTSKTCSNCGFTITSADYDRVLEKLKKTATGWMTTINGKELKVEGQITYYNRYKRQNVVKDLSVELDRLSEESVNNDISSWTKGRSGEALSLLKKRFSHRPVQEKFVCLNCGFETHADEQAALNIARSWLFLRSQEYKKYQTNKTTGNTDKRAFVETWQSFYRKKLKEVWKPAV

SEQ ID NO: 795 - protein, 978 aa, Artificial Sequence
  CasX Variant
QEIKRINKIRRRLVKDSNTKKAGKTGPMKTLLVRVMTPDLRERLENLRKKPENIPQPISNTSRANLNKLLTDYTEMKKAILHVYWEEFQKDPVGLMSRVAQPASKKIDQNKLKPEMDEKGNLTTAGFACSQCGQPLFVYKLEQVSEKGKAYTNYFGRCNVAEHEKLILLAQLKPEKDSDEAVTYSLGKFGQRALDFYSIHVTKESTHPVKPLAQIAGNRYASYPVGKALSGACMGTIASFLSKYQDIIIEHQKVVKGNQKRLESLRELAGKENLEYPSVTLPPQPHTKEGVDAYNEVIARVRMWVNLNLWQKLKLSRDDAKPLLRLKGFPSFPLVERQANEVDWWDMVCNVKKLINEKKEDGKVFWQNLAGYKRQEALRPYLSSEEDRKKGKKFARYQLGDLLLHLEKKHGEDWGKVYDEAWERIDKKVEGLSKHIKLEEERRSEDAQSKAALTDWLRAKASFVIEGLKEADKDEFCRCELKLQKWYGDLRGKPFAIEAENSILDISGFSKQYNCAFIWQKDGVKKLNLYLIINYFKGGKLRFKKIKPEAFEANRFYTVINKKSGEIVPMEVNFNFDDPNLIILPLAFGKRQGREFIWNDLLSLETGSLKLANGRVIEKTLYNRRTRQDEPALFVALTFERREVLDSSNIKPMNLIGVDRGENIPAVIALTDPEGCPLSRFKDSLGNPTHILRIGESYKEKQRTIQAKKEVEQRRAGGYSRKYASKAKNLADDMVRNTARDLLYYAVTQDAMLIFENLSRGFGRQGKRTFMAERQYTRMEDWLTAKLAYEGLPSKTYLSKTLAQYTSKTCSNCGFTITSADYDRVLEKLKKTATGWMTTINGKELKVEGQITYYNRYKRQNVVKDLSVELDRLSEESVNNDISSWTKGRSGEALSLLKKRFSHRPVQEKFVCLNCGFETHADEQAALNIARSWLFLRSQEYKKYQTNKTTGNTDKRAFVETWQSFYRKKLKEVWKPAV

SEQ ID NO: 796 - protein, 978 aa, Artificial Sequence
  CasX Variant
QEIKRINKIRRRLVKDSNTKKAGKTGPMKTLLVRVMTPDLRERLENLRKKPENIPQPISNTSRANLNKLLTDYTEMKKAILHVYWEEFQKDPVGLMSRVAQPASKKIDQNKLKPEMDEKGNLTTAGFACSQCGQPLFVYKLEQVSEKGKAYTNYFGRCNVAEHEKLILLAQLKPEKDSDEAVTYSLGKFGQRALDFYSIHVTKESTHPVKPLAQIAGNRYASHPVGKALSGACMGTIASFLSKYQDIIIEHQKVVKGNQKRLESLRELAGKENLEYPSVTLPPQPHTKEGVDAYNEVIARVRMWVNLNLWQKLKLSRDDAKPLLRLKGFPSFPLVERQANEVDWWDMVCNVKKLINEKKEDGKVFWQNLAGYKRQEALRPYLSSEEDRKKGKKFARYQLGDLLLHLEKKHGEDWGKVYDEAWERIDKKVEGLSKHIKLEEERRSEDAQSKAALTDWLRAKASFVIEGLKEADKDEFCRCELKLQKWYGDLRGKPFAIEAENSILDISGFSKQYNCAFIWQKDGVKKLNLYLIINYFKGGKLRFKKIKPEAFEANRFYTVINKKSGEIVPMEVNFNFDDPNLIILPLAFGKRQGREFIWNDLLSLETGSLKLANGRVIEKTLYNRRTRQDEPALFVALTFERREVLDSSNIKPMNLIGVDRGENIPAVIALTDPEGCPLSRFKDSLGNPTHILRIGESYKEKQRTIQAKKEVEQRRAGGYSRKYASKAKNLADDMVRNTARDLLYYAVTQDAMLIFENLSRGFGRQGKRTFMAERQYTRMEDWLTAKLAYEGLPSKTYLSKTLAQYTSKTCSNCGFTITSADYDRVLEKLKKTATGWMTTINGKELKVEGQITYYNRYKRQNVVKDLSVELDRLSEESVNNDISSWTKGRSGEALSLLKKRFSHRPVQEKFVCLNCGFETHADEQAALNIARSWLFLRSQEYKKYQTNKTTGNTDKRAFVETWQSFYRKKLKEVWKPAV

SEQ ID NO: 797 - protein, 979 aa, Artificial Sequence
  CasX Variant
QEIKRINKIRRRLVKDSNTKKAGKTRGPMKTLLVRVMTPDLRERLENLRKKPENIPQPISNTSRANLNKLLTDYTEMKKAILHVYWEEFQKDPVGLMSRVAQPASKKIDQNKLKPEMDEKGNLTTAGFACSQCGQPLFVYKLEQVSEKGKAYTNYFGRCNVAEHEKLILLAQLKPEKDSDEAVTYSLGKFGQRALDFYSIHVTKESTHPVKPLAQIAGNRYASYPVGKALSGACMGTIASFLSKYQDIIIEHQKVVKGNQKRLESLRELAGKENLEYPSVTLPPQPHTKEGVDAYNEVIARVRMWVNLNLWQKLKLSRDDAKPLLRLKGFPSFPLVERQANEVDWWDMVCNVKKLINEKKEDGKVFWQNLAGYKRQEALRPYLSSEEDRKKGKKFARYQLGDLLLHLEKKHGEDWGKVYDEAWERIDKKVEGLSKHIKLEEERRSEDAQSKAALTDWLRAKASFVIEGLKEADKDEFCRCELKLQKWYGDLRGKPFAIEAENSILDISGFSKQYNCAFIWQKDGVKKLNLYLIINYFKGGKLRFKKIKPEAFEANRFYTVINKKSGEIVPMEVNFNFDDPNLIILPLAFGKRQGREFIWNDLLSLETGSLKLANGRVIEKTLYNRRTRQDEPALFVALTFERREVLDSSNIKPMNLIGVDRGENIPAVIALTDPEGCPLSRFKDSLGNPTHILRIGESYKEKQRTIQAKKEVEQRRAGGYSRKYASKAKNLADDMVRNTARDLLYYAVTQDAMLIFENLSRGFGRQGKRTFMAERQYTRMEDWLTAKLAYEGLPSKTYLSKTLAQYTSKTCSNCGFTITSADYDRVLEKLKKTATGWMTTINGKELKVEGQITYYNRYKRQNVVKDLSVELDRLSEESVNNDISSWTKGRSGEALSLLKKRFSHRPVQEKFVCLNCGFETHADEQAALNIARSWLFLRSQEYKKYQTNKTTGNTDKRAFVETWQSFYRKKLKEVWKPAV

SEQ ID NO: 798 - protein, 979 aa, Artificial Sequence
  CasX Variant
QEIKRINKIRRRLVKDSNTKKAGKTRGPMKTLLVRVMTPDLRERLENLRKKPENIPQPISNTSRANLNKLLTDYTEMKKAILHVYWEEFQKDPVGLMSRVAQPASKKIDQNKLKPEMDEKGNLTTAGFACSQCGQPLFVYKLEQVSEKGKAYTNYFGRCNVAEHEKLILLAQLKPEKDSDEAVTYSLGKFGQRALDFYSIHVTKESTHPVKPLAQIAGNRYASHPVGKALSGACMGTIASFLSKYQDIIIEHQKVVKGNQKRLESLRELAGKENLEYPSVTLPPQPHTKEGVDAYNEVIARVRMWVNLNLWQKLKLSRDDAKPLLRLKGFPSFPLVERQANEVDWWDMVCNVKKLINEKKEDGKVFWQNLAGYKRQEALRPYLSSEEDRKKGKKFARYQLGDLLLHLEKKHGEDWGKVYDEAWERIDKKVEGLSKHIKLEEERRSEDAQSKAALTDWLRAKASFVIEGLKEADKDEFCRCELKLQKWYGDLRGKPFAIEAENSILDISGFSKQYNCAFIWQKDGVKKLNLYLIINYFKGGKLRFKKIKPEAFEANRFYTVINKKSGEIVPMEVNFNFDDPNLIILPLAFGKRQGREFIWNDLLSLETGSLKLANGRVIEKTLYNRRTRQDEPALFVALTFERREVLDSSNIKPMNLIGVDRGENIPAVIALTDPEGCPLSRFKDSLGNPTHILRIGESYKEKQRTIQAKKEVEQRRAGGYSRKYASKAKNLADDMVRNTARDLLYYAVTQDAMLIFENLSRGFGRQGKRTFMAERQYTRMEDWLTAKLAYEGLPSKTYLSKTLAQYTSKTCSNCGFTITSADYDRVLEKLKKTATGWMTTINGKELKVEGQITYYNRYKRQNVVKDLSVELDRLSEESVNNDISSWTKGRSGEALSLLKKRFSHRPVQEKFVCLNCGFETHADEQAALNIARSWLFLRSQEYKKYQTNKTTGNTDKRAFVETWQSFYRKKLKEVWKPAV

SEQ ID NO: 799 - protein, 978 aa, Artificial Sequence
  CasX Variant
QEIKRINKIRRRLVKDSNTKKAGKTGPMKTLLVRVMTPDLRERLENLRKKPENIPQPISNTSRANLNKLLTDYTEMKKAILHVYWEEFQKDPVGLMSRVAQPASKKIDQNKLKPEMDEKGNLTTAGFACSQCGQPLFVYKLEQVSEKGKAYTNYFGRCNVAEHEKLIKLAQLKPEKDSDEAVTYSLGKFGQRALDFYSIHVTKESTHPVKPLAQIAGNRYASGPVGKALSGACMGTIASFLSKYQDIIIEHQKVVKGNQKRLESLRELAGKENLEYPSVTLPPQPHTKEGVDAYNEVIARVRMWVNLNLWQKLKLSRDDAKPLLRLKGFPSFPLVERQANEVDWWDMVCNVKKLINEKKEDGKVFWQNLAGYKRQEALRPYLSSEEDRKKGKKFARYQLGDLLLHLEKKHGEDWGKVYDEAWERIDKKVEGLSKHIKLEEERRSEDAQSKAALTDWLRAKASFVIEGLKEADKDEFCRCELKLQKWYGDLRGKPFAIEAENSILDISGFSKQYNCAFIWQKDGVKKLNLYLIINYFKGGKLRFKKIKPEAFEANRFYTVINKKSGEIVPMEVNFNFDDPNLIILPLAFGKRQGREFIWNDLLSLETGSLKLANGRVIEKTLYNRRTRQDEPALFVALTFERREVLDSSNIKPMNLIGVDRGENIPAVIALTDPEGCPLSRFKDSLGNPTHILRIGESYKEKQRTIQAKKEVEQRRAGGYSRKYASKAKNLADDMVRNTARDLLYYAVTQDAMLIFENLSRGFGRQGKRTFMAERQYTRMEDWLTAKLAYEGLPSKTYLSKTLAQYTSKTCSNCGFTITSADYDRVLEKLKKTATGWMTTINGKELKVEGQITYYNRYKRQNVVKDLSVELDRLSEESVNNDISSWTKGRSGEALSLLKKRFSHRPVQEKFVCLNCGFETHADEQAALNIARSWLFLRSQEYKKYQTNKTTGNTDKRAFVETWQSFYRKKLKEVWKPAV

SEQ ID NO: 800 - protein, 978 aa, Artificial Sequence
  CasX Variant
QEIKRINKIRRRLVKDSNTKKAGKTGPMKTLLVRVMTPDLRERLENLRKKPENIPQPISNTSRANLNKLLTDYTEMKKAILHVYWEEFQKDPVGLMSRVAQPASKKIDQNKLKPEMDEKGNLTTAGFACSQCGQPLFVYKLEQVSEKGKAYTNYFGRCNVAEHEKLIKLAQLKPEKDSDEAVTYSLGKFGQRALDFYSIHVTKESTHPVKPLAQIAGNRYASYPVGKALSGACMGTIASFLSKYQDIIIEHQKVVKGNQKRLESLRELAGKENLEYPSVTLPPQPHTKEGVDAYNEVIARVRMWVNLNLWQKLKLSRDDAKPLLRLKGFPSFPLVERQANEVDWWDMVCNVKKLINEKKEDGKVFWQNLAGYKRQEALRPYLSSEEDRKKGKKFARYQLGDLLLHLEKKHGEDWGKVYDEAWERIDKKVEGLSKHIKLEEERRSEDAQSKAALTDWLRAKASFVIEGLKEADKDEFCRCELKLQKWYGDLRGKPFAIEAENSILDISGFSKQYNCAFIWQKDGVKKLNLYLIINYFKGGKLRFKKIKPEAFEANRFYTVINKKSGEIVPMEVNFNFDDPNLIILPLAFGKRQGREFIWNDLLSLETGSLKLANGRVIEKTLYNRRTRQDEPALFVALTFERREVLDSSNIKPMNLIGVDRGENIPAVIALTDPEGCPLSRFKDSLGNPTHILRIGESYKEKQRTIQAKKEVEQRRAGGYSRKYASKAKNLADDMVRNTARDLLYYAVTQDAMLIFENLSRGFGRQGKRTFMAERQYTRMEDWLTAKLAYEGLPSKTYLSKTLAQYTSKTCSNCGFTITSADYDRVLEKLKKTATGWMTTINGKELKVEGQITYYNRYKRQNVVKDLSVELDRLSEESVNNDISSWTKGRSGEALSLLKKRFSHRPVQEKFVCLNCGFETHADEQAALNIARSWLFLRSQEYKKYQTNKTTGNTDKRAFVETWQSFYRKKLKEVWKPAV

SEQ ID NO: 801 - protein, 979 aa, Artificial Sequence
  CasX Variant
QEIKRINKIRRRLVKDSNTKKAGKTRGPMKTLLVRVMTPDLRERLENLRKKPENIPQPISNTSRANLNKLLTDYTEMKKAILHVYWEEFQKDPVGLMSRVAQPASKKIDQNKLKPEMDEKGNLTTAGFACSQCGQPLFVYKLEQVSEKGKAYTNYFGRCNVAEHEKLIKLAQLKPEKDSDEAVTYSLGKFGQRALDFYSIHVTKESTHPVKPLAQIAGNRYASGPVGKALSGACMGTIASFLSKYQDIIIEHQKVVKGNQKRLESLRELAGKENLEYPSVTLPPQPHTKEGVDAYNEVIARVRMWVNLNLWQKLKLSRDDAKPLLRLKGFPSFPLVERQANEVDWWDMVCNVKKLINEKKEDGKVFWQNLAGYKRQEALRPYLSSEEDRKKGKKFARYQLGDLLLHLEKKHGEDWGKVYDEAWERIDKKVEGLSKHIKLEEERRSEDAQSKAALTDWLRAKASFVIEGLKEADKDEFCRCELKLQKWYGDLRGKPFAIEAENSILDISGFSKQYNCAFIWQKDGVKKLNLYLIINYFKGGKLRFKKIKPEAFEANRFYTVINKKSGEIVPMEVNFNFDDPNLIILPLAFGKRQGREFIWNDLLSLETGSLKLANGRVIEKTLYNRRTRQDEPALFVALTFERREVLDSSNIKPMNLIGVDRGENIPAVIALTDPEGCPLSRFKDSLGNPTHILRIGESYKEKQRTIQAKKEVEQRRAGGYSRKYASKAKNLADDMVRNTARDLLYYAVTQDAMLIFENLSRGFGRQGKRTFMAERQYTRMEDWLTAKLAYEGLPSKTYLSKTLAQYTSKTCSNCGFTITSADYDRVLEKLKKTATGWMTTINGKELKVEGQITYYNRYKRQNVVKDLSVELDRLSEESVNNDISSWTKGRSGEALSLLKKRFSHRPVQEKFVCLNCGFETHADEQAALNIARSWLFLRSQEYKKYQTNKTTGNTDKRAFVETWQSFYRKKLKEVWKPAV

SEQ ID NO: 802 - protein, 979 aa, Artificial Sequence
  CasX Variant
QEIKRINKIRRRLVKDSNTKKAGKTRGPMKTLLVRVMTPDLRERLENLRKKPENIPQPISNTSRANLNKLLTDYTEMKKAILHVYWEEFQKDPVGLMSRVAQPASKKIDQNKLKPEMDEKGNLTTAGFACSQCGQPLFVYKLEQVSEKGKAYTNYFGRCNVAEHEKLIKLAQLKPEKDSDEAVTYSLGKFGQRALDFYSIHVTKESTHPVKPLAQIAGNRYASYPVGKALSGACMGTIASFLSKYQDIIIEHQKVVKGNQKRLESLRELAGKENLEYPSVTLPPQPHTKEGVDAYNEVIARVRMWVNLNLWQKLKLSRDDAKPLLRLKGFPSFPLVERQANEVDWWDMVCNVKKLINEKKEDGKVFWQNLAGYKRQEALRPYLSSEEDRKKGKKFARYQLGDLLLHLEKKHGEDWGKVYDEAWERIDKKVEGLSKHIKLEEERRSEDAQSKAALTDWLRAKASFVIEGLKEADKDEFCRCELKLQKWYGDLRGKPFAIEAENSILDISGFSKQYNCAFIWQKDGVKKLNLYLIINYFKGGKLRFKKIKPEAFEANRFYTVINKKSGEIVPMEVNFNFDDPNLIILPLAFGKRQGREFIWNDLLSLETGSLKLANGRVIEKTLYNRRTRQDEPALFVALTFERREVLDSSNIKPMNLIGVDRGENIPAVIALTDPEGCPLSRFKDSLGNPTHILRIGESYKEKQRTIQAKKEVEQRRAGGYSRKYASKAKNLADDMVRNTARDLLYYAVTQDAMLIFENLSRGFGRQGKRTFMAERQYTRMEDWLTAKLAYEGLPSKTYLSKTLAQYTSKTCSNCGFTITSADYDRVLEKLKKTATGWMTTINGKELKVEGQITYYNRYKRQNVVKDLSVELDRLSEESVNNDISSWTKGRSGEALSLLKKRFSHRPVQEKFVCLNCGFETHADEQAALNIARSWLFLRSQEYKKYQTNKTTGNTDKRAFVETWQSFYRKKLKEVWKPAV

SEQ ID NO: 803 - protein, 979 aa, Artificial Sequence
  CasX Variant
QEIKRINKIRRRLVKDSNTKKAGKTRGPMKTLLVRVMTPDLRERLENLRKKPENIPQPISNTSRANLNKLLTDYTEMKKAILHVYWEEFQKDPVGLMSRVAQPASKKIDQNKLKPEMDEKGNLTTAGFACSQCGQPLFVYKLEQVSEKGKAYTNYFGRCNVAEHEKLIKLAQLKPEKDSDEAVTYSLGKFGQRALDFYSIHVTKESTHPVKPLAQIAGNRYASHPVGKALSGACMGTIASFLSKYQDIIIEHQKVVKGNQKRLESLRELAGKENLEYPSVTLPPQPHTKEGVDAYNEVIARVRMWVNLNLWQKLKLSRDDAKPLLRLKGFPSFPLVERQANEVDWWDMVCNVKKLINEKKEDGKVFWQNLAGYKRQEALRPYLSSEEDRKKGKKFARYQLGDLLLHLEKKHGEDWGKVYDEAWERIDKKVEGLSKHIKLEEERRSEDAQSKAALTDWLRAKASFVIEGLKEADKDEFCRCELKLQKWYGDLRGKPFAIEAENSILDISGFSKQYNCAFIWQKDGVKKLNLYLIINYFKGGKLRFKKIKPEAFEANRFYTVINKKSGEIVPMEVNFNFDDPNLIILPLAFGKRQGREFIWNDLLSLETGSLKLANGRVIEKTLYNRRTRQDEPALFVALTFERREVLDSSNIKPMNLIGVDRGENIPAVIALTDPEGCPLSRFKDSLGNPTHILRIGESYKEKQRTIQAKKEVEQRRAGGYSRKYASKAKNLADDMVRNTARDLLYYAVTQDAMLIFENLSRGFGRQGKRTFMAERQYTRMEDWLTAKLAYEGLPSKTYLSKTLAQYTSKTCSNCGFTITSADYDRVLEKLKKTATGWMTTINGKELKVEGQITYYNRYKRQNVVKDLSVELDRLSEESVNNDISSWTKGRSGEALSLLKKRFSHRPVQEKFVCLNCGFETHADEQAALNIARSWLFLRSQEYKKYQTNKTTGNTDKRAFVETWQSFYRKKLKEVWKPAV

SEQ ID NO: 804 - protein, 979 aa, Artificial Sequence; identical to SEQ ID NO: 652
  CasX Variant

SEQ ID NO: 805 - protein, 979 aa, Artificial Sequence
  CasX Variant
QEIKRINKIRRRLVKDSNTKKAGKTRGPMKTLLVRVMTPDLRERLENLRKKPENIPQPISNTSRANLNKLLTDYTEMKKAILHVYWEEFQKDPVGLMSRVAQPASKKIDQNKLKPEMDEKGNLTTAGFACSQCGQPLFVYKLEQVSEKGKAYTNYFGRCNVAEHEKLILLAQLKPEKDSDEAVTYSLGKFGQRALDFYSIHVTKESTHPVKPLAQIAGNRYASHPVGKALSDACMGTIASFLSKYQDIIIEHQKVVKGNQKRLESLRELAGKENLEYPSVTLPPQPHTKEGVDAYNEVIARVRMWVNLNLWQKLKLSRDDAKPLLRLKGFPSFPLVERQANEVDWWDMVCNVKKLINEKKEDGKVFWQNLAGYKRQEALRPYLSSEEDRKKGKKFARYQLGDLLLHLEKKHGEDWGKVYDEAWERIDKKVEGLSKHIKLEEERRSEDAQSKAALTDWLRAKASFVIEGLKEADKDEFCRCELKLQKWYGDLRGKPFAIEAENSILDISGFSKQYNCAFIWQKDGVKKLNLYLIINYFKGGKLRFKKIKPEAFEANRFYTVINKKSGEIVPMEVNFNFDDPNLIILPLAFGKRQGREFIWNDLLSLETGSLKLANGRVIEKTLYNRRTRQDEPALFVALTFERREVLDSSNIKPMNLIGVDRGENIPAVIALTDPEGCPLSRFKDSLGNPTHILRIGESYKEKQRTIQAKKEVEQRRAGGYSRKYASKAKNLADDMVRNTARDLLYYAVTQDAMLIFENLSRGFGRQGKRTFMAERQYTRMEDWLTAKLAYEGLPSKTYLSKTLAQYTSKTCSNCGFTITSADYDRVLEKLKKTATGWMTTINGKELKVEGQITYYNRYKRQNVVKDLSVELDRLSEESVNNDISSWTKGRSGEALSLLKKRFSHRPVQEKFVCLNCGFETHADEQAALNIARSWLFLRSQEYKKYQTNKTTGNTDKRAFVETWQSFYRKKLKEVWKPAV

SEQ ID NO: 806 - protein, 978 aa, Artificial Sequence; identical to SEQ ID NO: 701
  CasX Variant

SEQ ID NO: 807 - protein, 978 aa, Artificial Sequence
  CasX Variant
QEIKRINKIRRRLVKDSNTKKAGKTGPMKTLLVRVMTPDLRERLENLRKKPENIPQPISNTSRANLNKLLTDYTEMKKAILHVYWEEFQKDPVGLMSRVAQPASKKIDQNKLKPEMDEKGNLTTAGFACSQCGQPLFVYKLEQVSEKGKAYTNYFGRCNVAEHEKLIKLAQLKPEKDSDEAVTYSLGKFGQRALDFYSIHVTKESTHPVKPLAQIAGNRYASYPVGKALSDACMGTIASFLSKYQDIIIEHQKVVKGNQKRLESLRELAGKENLEYPSVTLPPQPHTKEGVDAYNEVIARVRMWVNLNLWQKLKLSRDDAKPLLRLKGFPSFPLVERQANEVDWWDMVCNVKKLINEKKEDGKVFWQNLAGYKRQEALRPYLSSEEDRKKGKKFARYQLGDLLLHLEKKHGEDWGKVYDEAWERIDKKVEGLSKHIKLEEERRSEDAQSKAALTDWLRAKASFVIEGLKEADKDEFCRCELKLQKWYGDLRGKPFAIEAENSILDISGFSKQYNCAFIWQKDGVKKLNLYLIINYFKGGKLRFKKIKPEAFEANRFYTVINKKSGEIVPMEVNFNFDDPNLIILPLAFGKRQGREFIWNDLLSLETGSLKLANGRVIEKTLYNRRTRQDEPALFVALTFERREVLDSSNIKPMNLIGVDRGENIPAVIALTDPEGCPLSRFKDSLGNPTHILRIGESYKEKQRTIQAKKEVEQRRAGGYSRKYASKAKNLADDMVRNTARDLLYYAVTQDAMLIFENLSRGFGRQGKRTFMAERQYTRMEDWLTAKLAYEGLPSKTYLSKTLAQYTSKTCSNCGFTITSADYDRVLEKLKKTATGWMTTINGKELKVEGQITYYNRYKRQNVVKDLSVELDRLSEESVNNDISSWTKGRSGEALSLLKKRFSHRPVQEKFVCLNCGFETHADEQAALNIARSWLFLRSQEYKKYQTNKTTGNTDKRAFVETWQSFYRKKLKEVWKPAV

SEQ ID NO: 808 - protein, 978 aa, Artificial Sequence
  CasX Variant
QEIKRINKIRRRLVKDSNTKKAGKTGPMKTLLVRVMTPDLRERLENLRKKPENIPQPISNTSRANLNKLLTDYTEMKKAILHVYWEEFQKDPVGLMSRVAQPASKKIDQNKLKPEMDEKGNLTTAGFACSQCGQPLFVYKLEQVSEKGKAYTNYFGRCNVAEHEKLIKLAQLKPEKDSDEAVTYSLGKFGQRALDFYSIHVTKESTHPVKPLAQIAGNRYASHPVGKALSDACMGTIASFLSKYQDIIIEHQKVVKGNQKRLESLRELAGKENLEYPSVTLPPQPHTKEGVDAYNEVIARVRMWVNLNLWQKLKLSRDDAKPLLRLKGFPSFPLVERQANEVDWWDMVCNVKKLINEKKEDGKVFWQNLAGYKRQEALRPYLSSEEDRKKGKKFARYQLGDLLLHLEKKHGEDWGKVYDEAWERIDKKVEGLSKHIKLEEERRSEDAQSKAALTDWLRAKASFVIEGLKEADKDEFCRCELKLQKWYGDLRGKPFAIEAENSILDISGFSKQYNCAFIWQKDGVKKLNLYLIINYFKGGKLRFKKIKPEAFEANRFYTVINKKSGEIVPMEVNFNFDDPNLIILPLAFGKRQGREFIWNDLLSLETGSLKLANGRVIEKTLYNRRTRQDEPALFVALTFERREVLDSSNIKPMNLIGVDRGENIPAVIALTDPEGCPLSRFKDSLGNPTHILRIGESYKEKQRTIQAKKEVEQRRAGGYSRKYASKAKNLADDMVRNTARDLLYYAVTQDAMLIFENLSRGFGRQGKRTFMAERQYTRMEDWLTAKLAYEGLPSKTYLSKTLAQYTSKTCSNCGFTITSADYDRVLEKLKKTATGWMTTINGKELKVEGQITYYNRYKRQNVVKDLSVELDRLSEESVNNDISSWTKGRSGEALSLLKKRFSHRPVQEKFVCLNCGFETHADEQAALNIARSWLFLRSQEYKKYQTNKTTGNTDKRAFVETWQSFYRKKLKEVWKPAV

SEQ ID NO: 809 - protein, 979 aa, Artificial Sequence
  CasX Variant
QEIKRINKIRRRLVKDSNTKKAGKTRGPMKTLLVRVMTPDLRERLENLRKKPENIPQPISNTSRANLNKLLTDYTEMKKAILHVYWEEFQKDPVGLMSRVAQPASKKIDQNKLKPEMDEKGNLTTAGFACSQCGQPLFVYKLEQVSEKGKAYTNYFGRCNVAEHEKLIKLAQLKPEKDSDEAVTYSLGKFGQRALDFYSIHVTKESTHPVKPLAQIAGNRYASYPVGKALSDACMGTIASFLSKYQDIIIEHQKVVKGNQKRLESLRELAGKENLEYPSVTLPPQPHTKEGVDAYNEVIARVRMWVNLNLWQKLKLSRDDAKPLLRLKGFPSFPLVERQANEVDWWDMVCNVKKLINEKKEDGKVFWQNLAGYKRQEALRPYLSSEEDRKKGKKFARYQLGDLLLHLEKKHGEDWGKVYDEAWERIDKKVEGLSKHIKLEEERRSEDAQSKAALTDWLRAKASFVIEGLKEADKDEFCRCELKLQKWYGDLRGKPFAIEAENSILDISGFSKQYNCAFIWQKDGVKKLNLYLIINYFKGGKLRFKKIKPEAFEANRFYTVINKKSGEIVPMEVNFNFDDPNLIILPLAFGKRQGREFIWNDLLSLETGSLKLANGRVIEKTLYNRRTRQDEPALFVALTFERREVLDSSNIKPMNLIGVDRGENIPAVIALTDPEGCPLSRFKDSLGNPTHILRIGESYKEKQRTIQAKKEVEQRRAGGYSRKYASKAKNLADDMVRNTARDLLYYAVTQDAMLIFENLSRGFGRQGKRTFMAERQYTRMEDWLTAKLAYEGLPSKTYLSKTLAQYTSKTCSNCGFTITSADYDRVLEKLKKTATGWMTTINGKELKVEGQITYYNRYKRQNVVKDLSVELDRLSEESVNNDISSWTKGRSGEALSLLKKRFSHRPVQEKFVCLNCGFETHADEQAALNIARSWLFLRSQEYKKYQTNKTTGNTDKRAFVETWQSFYRKKLKEVWKPAV

SEQ ID NO: 810 - protein, 979 aa, Artificial Sequence
  CasX Variant
QEIKRINKIRRRLVKDSNTKKAGKTRGPMKTLLVRVMTPDLRERLENLRKKPENIPQPISNTSRANLNKLLTDYTEMKKAILHVYWEEFQKDPVGLMSRVAQPASKKIDQNKLKPEMDEKGNLTTAGFACSQCGQPLFVYKLEQVSEKGKAYTNYFGRCNVAEHEKLIKLAQLKPEKDSDEAVTYSLGKFGQRALDFYSIHVTKESTHPVKPLAQIAGNRYASHPVGKALSDACMGTIASFLSKYQDIIIEHQKVVKGNQKRLESLRELAGKENLEYPSVTLPPQPHTKEGVDAYNEVIARVRMWVNLNLWQKLKLSRDDAKPLLRLKGFPSFPLVERQANEVDWWDMVCNVKKLINEKKEDGKVFWQNLAGYKRQEALRPYLSSEEDRKKGKKFARYQLGDLLLHLEKKHGEDWGKVYDEAWERIDKKVEGLSKHIKLEEERRSEDAQSKAALTDWLRAKASFVIEGLKEADKDEFCRCELKLQKWYGDLRGKPFAIEAENSILDISGFSKQYNCAFIWQKDGVKKLNLYLIINYFKGGKLRFKKIKPEAFEANRFYTVINKKSGEIVPMEVNFNFDDPNLIILPLAFGKRQGREFIWNDLLSLETGSLKLANGRVIEKTLYNRRTRQDEPALFVALTFERREVLDSSNIKPMNLIGVDRGENIPAVIALTDPEGCPLSRFKDSLGNPTHILRIGESYKEKQRTIQAKKEVEQRRAGGYSRKYASKAKNLADDMVRNTARDLLYYAVTQDAMLIFENLSRGFGRQGKRTFMAERQYTRMEDWLTAKLAYEGLPSKTYLSKTLAQYTSKTCSNCGFTITSADYDRVLEKLKKTATGWMTTINGKELKVEGQITYYNRYKRQNVVKDLSVELDRLSEESVNNDISSWTKGRSGEALSLLKKRFSHRPVQEKFVCLNCGFETHADEQAALNIARSWLFLRSQEYKKYQTNKTTGNTDKRAFVETWQSFYRKKLKEVWKPAV

SEQ ID NO: 811 - protein, 978 aa, Artificial Sequence
  CasX Variant
QEIKRINKIRRRLVKDSNTKKAGKTGPMKTLLVRVMTPDLRERLENLRKKPENIPQPISNTSRANLNKLLTDYTEMKKAILHVYWEEFQKDPVGLMSRVAQPASKKIDQNKLKPEMDEKGNLTTAGFACSQCGQPLFVYKLEQVSEKGKAYTNYFGRCNVAEHEKLIKLAQLKPEKDSDEAVTYSLGKFGQRALDFYSIHVTKESTHPVKPLAQIAGNRYASHPVGKALSGACMGTIASFLSKYQDIIIEHQKVVKGNQKRLESLRELAGKENLEYPSVTLPPQPHTKEGVDAYNEVIARVRMWVNLNLWQKLKLSRDDAKPLLRLKGFPSFPLVERQANEVDWWDMVCNVKKLINEKKEDGKVFWQNLAGYKRQEALRPYLSSEEDRKKGKKFARYQLGDLLLHLEKKHGEDWGKVYDEAWERIDKKVEGLSKHIKLEEERRSEDAQSKAALTDWLRAKASFVIEGLKEADKDEFCRCELKLQKWYGDLRGKPFAIEAENSILDISGFSKQYNCAFIWQKDGVKKLNLYLIINYFKGGKLRFKKIKPEAFEANRFYTVINKKSGEIVPMEVNFNFDDPNLIILPLAFGKRQGREFIWNDLLSLETGSLKLANGRVIEKTLYNRRTRQDEPALFVALTFERREVLDSSNIKPMNLIGVDRGENIPAVIALTDPEGCPLSRFKDSLGNPTHILRIGESYKEKQRTIQAKKEVEQRRAGGYSRKYASKAKNLADDMVRNTARDLLYYAVTQDAMLIFENLSRGFGRQGKRTFMAERQYTRMEDWLTAKLAYEGLPSKTYLSKTLAQYTSKTCSNCGFTITSADYDRVLEKLKKTATGWMTTINGKELKVEGQITYYNRYKRQNVVKDLSVELDRLSEESVNNDISSWTKGRSGEALSLLKKRFSHRPVQEKFVCLNCGFETHADEQAALNIARSWLFLRSQEYKKYQTNKTTGNTDKRAFVETWQSFYRKKLKEVWKPAV

SEQ ID NO: 812 - protein, 979 aa, Artificial Sequence
  CasX Variant
QEIKRINKIRRRLVKDSNTKKAGKTGPMKTLLVRVMTPDLRERLENLRKKPENIPQPISNTSRANLNKLLTDYTEMKKAILHVYWEEFQKDPVGLMSRVAQPASKKIDQNKLKPEMDEKGNLTTAGFACSQCGQPLFVYKLEQVSEKGKAYTNYFGRCNVAEHEKLILLAQLKPEKDSDEAVTYSLGKFGQRALDFYSIHVTKESTHPVKPLAQIAGNRYASGPVGKALSDACMGTIASFLSKYQDIIIEHQKVVKGNQKRLESLRELAGKENLEYPSVTLPPQPHTKEGVDAYNEVIARVRMWVNLNLWQKLKLSRDDAKPLLRLKGFPSFPLVERQANEVDWWDMVCNVKKLINEKKEDGKVFWQNLAGYKRQEALRPYLSSEEDRKKGKKFARYQLGDLLLHLEKKHGEDWGKVYDEAWERIDKKVEGLSKHIKLEEERRSEDAQSKAALTDWLRAKASFVIEGLKEADKDEFCRCELKLQKWYGDLRGKPFAIEAENSILDISGFSKQYNCAFIWQKDGVKKLNLYLIINYFKGGKLRFKKIKPEAFEANRFYTVINKKSGEIVPMEVNFNFDDPNLIILPLAFGKRQGREFIWNDLLSLETGSLKLANGRVIEKTLYNARRTRQDEPALFVALTFERREVLDSSNIKPMNLIGVDRGENIPAVIALTDPEGCPLSRFKDSLGNPTHILRIGESYKEKQRTIQAKKEVEQRRAGGYSRKYASKAKNLADDMVRNTARDLLYYAVTQDAMLIFENLSRGFGRQGKRTFMAERQYTRMEDWLTAKLAYEGLPSKTYLSKTLAQYTSKTCSNCGFTITSADYDRVLEKLKKTATGWMTTINGKELKVEGQITYYNRYKRQNVVKDLSVELDRLSEESVNNDISSWTKGRSGEALSLLKKRFSHRPVQEKFVCLNCGFETHADEQAALNIARSWLFLRSQEYKKYQTNKTTGNTDKRAFVETWQSFYRKKLKEVWKPAV

SEQ ID NO: 813 - protein, 978 aa, Artificial Sequence
  CasX Variant
QEIKRINKIRRRLVKDSNTKKAGKTGPMKTLLVRVMTPDLRERLENLRKKPENIPQPISNTSRANLNKLLTDYTEMKKAILHVYWEEFQVDPVGLMSRVAQPASKKIDQNKLKPEMDEKGNLTTAGFACSQCGQPLFVYKLEQVSEKGKAYTNYFGRCNVAEHEKLILLAQLKPEKDSDEAVTYSLGKFGQRALDFYSIHVTKESTHPVKPLAQIAGNRYASGPVGKALSDACMGTIASFLSKYQDIIIEHQKVVKGNQKRLESLRELAGKENLEYPSVTLPPQPHTKEGVDAYNEVIARVRMWVNLNLWQKLKLSRDDAKPLLRLKGFPSFPLVERQANEVDWWDMVCNVKKLINEKKEDGKVFWQNLAGYKRQEALRPYLSSEEDRKKGKKFARYQLGDLLLHLEKKHGEDWGKVYDEAWERIDKKVEGLSKHIKLEEERRSEDAQSKAALTDWLRAKASFVIEGLKEADKDEFCRCELKLQKWYGDLRGKPFAIEAENSILDISGFSKQYNCAFIWQKDGVKKLNLYLIINYFKGGKLRFKKIKPEAFEANRFYTVINKKSGEIVPMEVNFNFDDPNLIILPLAFGKRQGREFIWNDLLSLETGSLKLANGRVIEKTLYNRRTRQDEPALFVALTFERREVLDSSNIKPMNLIGVDRGENIPAVIALTDPEGCPLSRFKDSLGNPTHILRIGESYKEKQRTIQAKKEVEQRRAGGYSRKYASKAKNLADDMVRNTARDLLYYAVTQDAMLIFENLSRGFGRQGKRTFMAERQYTRMEDWLTAKLAYEGLPSKTYLSKTLAQYTSKTCSNCGFTITSADYDRVLEKLKKTATGWMTTINGKELKVEGQITYYNRYKRQNVVKDLSVELDRLSEESVNNDISSWTKGRSGEALSLLKKRFSHRPVQEKFVCLNCGFETHADEQAALNIARSWLFLRSQEYKKYQTNKTTGNTDKRAFVETWQSFYRKKLKEVWKPAV

SEQ ID NO: 814 - protein, 979 aa, Artificial Sequence
  CasX Variant
QEIKRINKIRRRLVKDSNTKKAGKTGPMKTLLVRVMTPDLRERLENLRKKPENIPQPISNTSRANLNKLLTDYTEMKKAILHVYWEGEFQKDPVGLMSRVAQPASKKIDQNKLKPEMDEKGNLTTAGFACSQCGQPLFVYKLEQVSEKGKAYTNYFGRCNVAEHEKLILLAQLKPEKDSDEAVTYSLGKFGQRALDFYSIHVTKESTHPVKPLAQIAGNRYASGPVGKALSDACMGTIASFLSKYQDIIIEHQKVVKGNQKRLESLRELAGKENLEYPSVTLPPQPHTKEGVDAYNEVIARVRMWVNLNLWQKLKLSRDDAKPLLRLKGFPSFPLVERQANEVDWWDMVCNVKKLINEKKEDGKVFWQNLAGYKRQEALRPYLSSEEDRKKGKKFARYQLGDLLLHLEKKHGEDWGKVYDEAWERIDKKVEGLSKHIKLEEERRSEDAQSKAALTDWLRAKASFVIEGLKEADKDEFCRCELKLQKWYGDLRGKPFAIEAENSILDISGFSKQYNCAFIWQKDGVKKLNLYLIINYFKGGKLRFKKIKPEAFEANRFYTVINKKSGEIVPMEVNFNFDDPNLIILPLAFGKRQGREFIWNDLLSLETGSLKLANGRVIEKTLYNRRTRQDEPALFVALTFERREVLDSSNIKPMNLIGVDRGENIPAVIALTDPEGCPLSRFKDSLGNPTHILRIGESYKEKQRTIQAKKEVEQRRAGGYSRKYASKAKNLADDMVRNTARDLLYYAVTQDAMLIFENLSRGFGRQGKRTFMAERQYTRMEDWLTAKLAYEGLPSKTYLSKTLAQYTSKTCSNCGFTITSADYDRVLEKLKKTATGWMTTINGKELKVEGQITYYNRYKRQNVVKDLSVELDRLSEESVNNDISSWTKGRSGEALSLLKKRFSHRPVQEKFVCLNCGFETHADEQAALNIARSWLFLRSQEYKKYQTNKTTGNTDKRAFVETWQSFYRKKLKEVWKPAV

SEQ ID NO: 815 - protein, 978 aa, Artificial Sequence
  CasX Variant
QEIKRINKIRRRLVKDSNTKKAGKTGPMKTLLVRVMTPDLRERLENLRKKPENIPQPISNTSRANLNKLLTDYTEMKKAILHVYWEEFQKDPVGLMSRVAQPASKKIDQNKLKPEMDEKGNLTTAGFACSQCGQPLFVYKLEQVSEKGKAYTNYFGRCNVAEHEKLILLAQLKPEKDSDEAVTYSLGKFGQRALDFYSIHVTKESTHPVKPLAQIAGNRYASGPVGKALSDACMGTIASFLSKYQDIIIEHQKVVKGNQKRLEHLRELAGKENLEYPSVTLPPQPHTKEGVDAYNEVIARVRMWVNLNLWQKLKLSRDDAKPLLRLKGFPSFPLVERQANEVDWWDMVCNVKKLINEKKEDGKVFWQNLAGYKRQEALRPYLSSEEDRKKGKKFARYQLGDLLLHLEKKHGEDWGKVYDEAWERIDKKVEGLSKHIKLEEERRSEDAQSKAALTDWLRAKASFVIEGLKEADKDEFCRCELKLQKWYGDLRGKPFAIEAENSILDISGFSKQYNCAFIWQKDGVKKLNLYLIINYFKGGKLRFKKIKPEAFEANRFYTVINKKSGEIVPMEVNFNFDDPNLIILPLAFGKRQGREFIWNDLLSLETGSLKLANGRVIEKTLYNRRTRQDEPALFVALTFERREVLDSSNIKPMNLIGVDRGENIPAVIALTDPEGCPLSRFKDSLGNPTHILRIGESYKEKQRTIQAKKEVEQRRAGGYSRKYASKAKNLADDMVRNTARDLLYYAVTQDAMLIFENLSRGFGRQGKRTFMAERQYTRMEDWLTAKLAYEGLPSKTYLSKTLAQYTSKTCSNCGFTITSADYDRVLEKLKKTATGWMTTINGKELKVEGQITYYNRYKRQNVVKDLSVELDRLSEESVNNDISSWTKGRSGEALSLLKKRFSHRPVQEKFVCLNCGFETHADEQAALNIARSWLFLRSQEYKKYQTNKTTGNTDKRAFVETWQSFYRKKLKEVWKPAV

SEQ ID NO: 816 - protein, 979 aa, Artificial Sequence
  CasX Variant
QEIKRINKIRRRLVKDSNTKKAGKTGPMKTLLVRVMTPDLRERLENLRKKPENIPQPISNTSRANLNKLLTDYTEMKKAILHVYWEEFQKDPVGLMSRVAQPASKKIDQNKLKPEMDEKGNLTTAGFACSQCGQPLFVYKLEQVSEKGKAYTNYFGRCNVAEHEKLILLAQLKPEKDSDEAVTYSLGKFGQRALDFYSIHVTKESTHPVKPLAQICAGNRYASGPVGKALSDACMGTIASFLSKYQDIIIEHQKVVKGNQKRLESLRELAGKENLEYPSVTLPPQPHTKEGVDAYNEVIARVRMWVNLNLWQKLKLSRDDAKPLLRLKGFPSFPLVERQANEVDWWDMVCNVKKLINEKKEDGKVFWQNLAGYKRQEALRPYLSSEEDRKKGKKFARYQLGDLLLHLEKKHGEDWGKVYDEAWERIDKKVEGLSKHIKLEEERRSEDAQSKAALTDWLRAKASFVIEGLKEADKDEFCRCELKLQKWYGDLRGKPFAIEAENSILDISGFSKQYNCAFIWQKDGVKKLNLYLIINYFKGGKLRFKKIKPEAFEANRFYTVINKKSGEIVPMEVNFNFDDPNLIILPLAFGKRQGREFIWNDLLSLETGSLKLANGRVIEKTLYNRRTRQDEPALFVALTFERREVLDSSNIKPMNLIGVDRGENIPAVIALTDPEGCPLSRFKDSLGNPTHILRIGESYKEKQRTIQAKKEVEQRRAGGYSRKYASKAKNLADDMVRNTARDLLYYAVTQDAMLIFENLSRGFGRQGKRTFMAERQYTRMEDWLTAKLAYEGLPSKTYLSKTLAQYTSKTCSNCGFTITSADYDRVLEKLKKTATGWMTTINGKELKVEGQITYYNRYKRQNVVKDLSVELDRLSEESVNNDISSWTKGRSGEALSLLKKRFSHRPVQEKFVCLNCGFETHADEQAALNIARSWLFLRSQEYKKYQTNKTTGNTDKRAFVETWQSFYRKKLKEVWKPAV

SEQ ID NO: 817 - protein, 976 aa, Artificial Sequence
  CasX Variant
QEIKRINKIRRRLVKDSNTKKAGKTGPMKTLLVRVMTPDLRERLENLRKKPENIPQPISNTSRANLNKLLTDYTEMKKAILHVYWEEFQKDPVGLMSRVAQPASKKIDQNKLKPEMDEKGNLTTAGFACSQCGQPLFVYKLEQVSEKGKAYTNYFGRCNVAEHEKLILLAQLKPEKDSDEAVTYSLGKFGQRALDFYSIHVTKESTHPVKPLAQIAGNRYASGPVGKALSDACMGTIASFLSKYQDIIIEHQKVVKGNQKRLESLRELAGKENLEYPSVTLPPQPHTKEGVDAYNEVIARVRMWVNLNLWQKLKLSRDDAKPLLRLKGFPSFPLVERQANEVDWWVCNVKKLINEKKEDGKVFWQNLAGYKRQEALRPYLSSEEDRKKGKKFARYQLGDLLLHLEKKHGEDWGKVYDEAWERIDKKVEGLSKHIKLEEERRSEDAQSKAALTDWLRAKASFVIEGLKEADKDEFCRCELKLQKWYGDLRGKPFAIEAENSILDISGFSKQYNCAFIWQKDGVKKLNLYLIINYFKGGKLRFKKIKPEAFEANRFYTVINKKSGEIVPMEVNFNFDDPNLIILPLAFGKRQGREFIWNDLLSLETGSLKLANGRVIEKTLYNRRTRQDEPALFVALTFERREVLDSSNIKPMNLIGVDRGENIPAVIALTDPEGCPLSRFKDSLGNPTHILRIGESYKEKQRTIQAKKEVEQRRAGGYSRKYASKAKNLADDMVRNTARDLLYYAVTQDAMLIFENLSRGFGRQGKRTFMAERQYTRMEDWLTAKLAYEGLPSKTYLSKTLAQYTSKTCSNCGFTITSADYDRVLEKLKKTATGWMTTINGKELKVEGQITYYNRYKRQNVVKDLSVELDRLSEESVNNDISSWTKGRSGEALSLLKKRFSHRPVQEKFVCLNCGFETHADEQAALNIARSWLFLRSQEYKKYQTNKTTGNTDKRAFVETWQSFYRKKLKEVWKPAV

SEQ ID NO: 818 - protein, 978 aa, Artificial Sequence
  CasX Variant
QEIKRINKIRRRLVKDSNTKKAGKTGPMKTLLVRVMTPDLRERLENLRKKPENIPQPISNTSRANLNKLLTDYTEMKKAILHVYWEEFQKDPVGLMSRVAQPASKKIDQNKLKPEMDEKGNLTTAGFACSQCGQPLFVYKLEQVSEKGKAYTNYFGRCNVAEHEKLILLAQLKPEKDSDEAVTYSLGKFGQRALDFYSIHVTKESTHPVKPLAQIAGNRYASGPVGKALSDACMGTIASFLSKYQDIIIEHQKVVKGNQKRLESLRELAGKENLEYPSVTLPPQPHTKEGVDAYNEVIARVRMWVNLNLWQKLKLSRDDAKPLLRLKGFPSFPLVERQANEVDWWDMVCNVKKLINEKKEDGKVFWQNLAGYKRQEALRPYLSSEEDRKKGKKFARYQLGDLLLHLEKKHGEDWGKVYDEAWERIDKKVEGLSKHIKLEEERRSEDAQSKAALTDWLRAKASFVIEGLKEADKDEFCRCELKLQKWYGDLRGKPFAIEAENSILDISGFSKQYNCAFIWQKDGVKKLNLYLIINYFGGGKLRFKKIKPEAFEANRFYTVINKKSGEIVPMEVNFNFDDPNLIILPLAFGKRQGREFIWNDLLSLETGSLKLANGRVIEKTLYNRRTRQDEPALFVALTFERREVLDSSNIKPMNLIGVDRGENIPAVIALTDPEGCPLSRFKDSLGNPTHILRIGESYKEKQRTIQAKKEVEQRRAGGYSRKYASKAKNLADDMVRNTARDLLYYAVTQDAMLIFENLSRGFGRQGKRTFMAERQYTRMEDWLTAKLAYEGLPSKTYLSKTLAQYTSKTCSNCGFTITSADYDRVLEKLKKTATGWMTTINGKELKVEGQITYYNRYKRQNVVKDLSVELDRLSEESVNNDISSWTKGRSGEALSLLKKRFSHRPVQEKFVCLNCGFETHADEQAALNIARSWLFLRSQEYKKYQTNKTTGNTDKRAFVETWQSFYRKKLKEVWKPAV

SEQ ID NO: 819 - protein, 979 aa, Artificial Sequence
  CasX Variant
QEIKRINKIRRRLVKDSNTKKAGKTGPMKTLLVRVMTPDLRERLENLRKKPENIPQPISNTSRANLNKLLTDYTEMKKAILHVYWEEFQKDPVGLMSRVAQPASKKIDQNKLKPEMDEKGNLTTAGFACSQCGQPLFVYKLEQVSEKGKAYTNYFGRCNVAEHEKLILLAQLKPEKDSDEAVTYSLGKFGQRALDFYSIHVTKESTHPVKPLAQIAGNRYASGPVGKALSDACMGTIASFLSKYQDIIIEHQKVVKGNQKRLESLRELAGKENLEYPSVTLPPQPHTKEGVDAYNEVIARVRMWVNLNLWQKLKLSRDDAKPLLRLKGFPSFPLVERQANEVDWWDMVCNVKKLINEKKEDGKVFWQNLAGYKRQEALRPYLSSEEDRKKGKKFARYQLGDLLLHLEKKHGEDWGKLVYDEAWERIDKKVEGLSKHIKLEEERRSEDAQSKAALTDWLRAKASFVIEGLKEADKDEFCRCELKLQKWYGDLRGKPFAIEAENSILDISGFSKQYNCAFIWQKDGVKKLNLYLIINYFKGGKLRFKKIKPEAFEANRFYTVINKKSGEIVPMEVNFNFDDPNLIILPLAFGKRQGREFIWNDLLSLETGSLKLANGRVIEKTLYNRRTRQDEPALFVALTFERREVLDSSNIKPMNLIGVDRGENIPAVIALTDPEGCPLSRFKDSLGNPTHILRIGESYKEKQRTIQAKKEVEQRRAGGYSRKYASKAKNLADDMVRNTARDLLYYAVTQDAMLIFENLSRGFGRQGKRTFMAERQYTRMEDWLTAKLAYEGLPSKTYLSKTLAQYTSKTCSNCGFTITSADYDRVLEKLKKTATGWMTTINGKELKVEGQITYYNRYKRQNVVKDLSVELDRLSEESVNNDISSWTKGRSGEALSLLKKRFSHRPVQEKFVCLNCGFETHADEQAALNIARSWLFLRSQEYKKYQTNKTTGNTDKRAFVETWQSFYRKKLKEVWKPAV

SEQ ID NO: 820 - protein, 979 aa, Artificial Sequence
  CasX Variant
QEIKRINKIRRRLVKDSNTKKAGKTGPMKTLLVRVMTPDLRERLENLRKKPENIPQPISNTSRANLNKLLTDYTEMKKAILHVYWEEFQKDPVGLMSRVAQPASKKIDQNKLKPEMDEKGNLTTAGFACSQCGQPLFVYKLEQVSEKGKAYTNYFGRCNVAEHEKLILLAQLKPEKDSDEAVTYSLGKFGQRALDFYSIHVTKESTHPVKPLAQIAGNRYASGPVGKALSDACMGTIASFLSKYQDIIIEHQKVVKGNQKRLESLRELAGKENLEYPSVTLPPQPHTKEGVDAYNEVIARVRMWVNLNLWQKLKLSRDDAKPLLRLKGQFPSFPLVERQANEVDWWDMVCNVKKLINEKKEDGKVFWQNLAGYKRQEALRPYLSSEEDRKKGKKFARYQLGDLLLHLEKKHGEDWGKVYDEAWERIDKKVEGLSKHIKLEEERRSEDAQSKAALTDWLRAKASFVIEGLKEADKDEFCRCELKLQKWYGDLRGKPFAIEAENSILDISGFSKQYNCAFIWQKDGVKKLNLYLIINYFKGGKLRFKKIKPEAFEANRFYTVINKKSGEIVPMEVNFNFDDPNLIILPLAFGKRQGREFIWNDLLSLETGSLKLANGRVIEKTLYNRRTRQDEPALFVALTFERREVLDSSNIKPMNLIGVDRGENIPAVIALTDPEGCPLSRFKDSLGNPTHILRIGESYKEKQRTIQAKKEVEQRRAGGYSRKYASKAKNLADDMVRNTARDLLYYAVTQDAMLIFENLSRGFGRQGKRTFMAERQYTRMEDWLTAKLAYEGLPSKTYLSKTLAQYTSKTCSNCGFTITSADYDRVLEKLKKTATGWMTTINGKELKVEGQITYYNRYKRQNVVKDLSVELDRLSEESVNNDISSWTKGRSGEALSLLKKRFSHRPVQEKFVCLNCGFETHADEQAALNIARSWLFLRSQEYKKYQTNKTTGNTDKRAFVETWQSFYRKKLKEVWKPAV

SEQ ID NO: 821 - protein, 978 aa, Artificial Sequence
  CasX Variant
QEIKRINKIRRRLVKDSNTKKAGKTGPMKTLLVRVMTPDLRERLENLRKKPENIPQPISNTSRANLNKLLTDYTEMKKAILHVYWEEFQKDPVGLMSRVAQPASKKIDQNKLKPEMDEKGNLTTAGFACSQCGQPLFVYKLEQVSEKGKAYTNYFGRCNVAEHEKLILLAQLKPEKDSDEAVTYSLGKFGQRALDFYSIHVTKESTHPVKPLAQIAGNRYASGPVGKALSDACMGTIASFLSKYQDIIIEHQKVVKGNQKRLESLRELAGKENLEYPSVTLPPQPHTKEGVDAYNEVIARVRMWVNLNLWQKLKLSRDDAKPLLRLKGFPSFPLVERQANEVSWWDMVCNVKKLINEKKEDGKVFWQNLAGYKRQEALRPYLSSEEDRKKGKKFARYQLGDLLLHLEKKHGEDWGKVYDEAWERIDKKVEGLSKHIKLEEERRSEDAQSKAALTDWLRAKASFVIEGLKEADKDEFCRCELKLQKWYGDLRGKPFAIEAENSILDISGFSKQYNCAFIWQKDGVKKLNLYLIINYFKGGKLRFKKIKPEAFEANRFYTVINKKSGEIVPMEVNFNFDDPNLIILPLAFGKRQGREFIWNDLLSLETGSLKLANGRVIEKTLYNRRTRQDEPALFVALTFERREVLDSSNIKPMNLIGVDRGENIPAVIALTDPEGCPLSRFKDSLGNPTHILRIGESYKEKQRTIQAKKEVEQRRAGGYSRKYASKAKNLADDMVRNTARDLLYYAVTQDAMLIFENLSRGFGRQGKRTFMAERQYTRMEDWLTAKLAYEGLPSKTYLSKTLAQYTSKTCSNCGFTITSADYDRVLEKLKKTATGWMTTINGKELKVEGQITYYNRYKRQNVVKDLSVELDRLSEESVNNDISSWTKGRSGEALSLLKKRFSHRPVQEKFVCLNCGFETHADEQAALNIARSWLFLRSQEYKKYQTNKTTGNTDKRAFVETWQSFYRKKLKEVWKPAV

SEQ ID NO: 822 - protein, 978 aa, Artificial Sequence
  CasX Variant
QEIKRINKIRRRLVKDSNTKKAGKTGPMKTLLVRVMTPDLRERLENLRKKPENIPQPISNTSRANLNKLLTDYTEMKKAILHVYWEEFQKDPVGLMSRVAQPASKKIDQNKLKPEMDEKGNLTTAGFACSQCGQPLFVYKLEQVSEKGKAYTNYFGRCNVAEHEKLILLAQLKPEKDSDEAVTYSLGKFGQRALDFYSIHVTKESTHPVKPLAQIAGNRYASGPVGKALSDACMGTIASFLSKYQDIIIEHQKVVKGNQKRLESLRELAGKENLEYPSVTLPPQPHTKEGVDAYNEVIARVRMWVNLNLWQKLKLSRDDAKPLLRLKGFPSFPLVERQANEVDWWDMVCNVKKLINEKKEDGKVFWQNLAGYKRQEALRPYLSSEEDRKKGKKFARYQLGDLLLHLEKKHGEDWGKVYDEAWERIDKKVEGLSKHIKLEEERRSEDAQSKAALTDWLREKASFVIEGLKEADKDEFCRCELKLQKWYGDLRGKPFAIEAENSILDISGFSKQYNCAFIWQKDGVKKLNLYLIINYFKGGKLRFKKIKPEAFEANRFYTVINKKSGEIVPMEVNFNFDDPNLIILPLAFGKRQGREFIWNDLLSLETGSLKLANGRVIEKTLYNRRTRQDEPALFVALTFERREVLDSSNIKPMNLIGVDRGENIPAVIALTDPEGCPLSRFKDSLGNPTHILRIGESYKEKQRTIQAKKEVEQRRAGGYSRKYASKAKNLADDMVRNTARDLLYYAVTQDAMLIFENLSRGFGRQGKRTFMAERQYTRMEDWLTAKLAYEGLPSKTYLSKTLAQYTSKTCSNCGFTITSADYDRVLEKLKKTATGWMTTINGKELKVEGQITYYNRYKRQNVVKDLSVELDRLSEESVNNDISSWTKGRSGEALSLLKKRFSHRPVQEKFVCLNCGFETHADEQAALNIARSWLFLRSQEYKKYQTNKTTGNTDKRAFVETWQSFYRKKLKEVWKPAV

SEQ ID NO: 823 - protein, 978 aa, Artificial Sequence
  CasX Variant
QEIKRINKIRRRLVKDSNTKKAGKTGPMKTLLVRVMTPDLRERLENLRKKPENIPQPISNTSRANLNKLLTDYTEMKKAILHVYWEEFQKDPVGLMSRVAQPASKKIDQNKLKPEMDEKGNLTTAGFACSQCGQPLFVYKLEQVSEKGKAYTNYFGRCNVAEHEKLILLAQLKPEKDSDEAVTYSLGKFGQRALDFYSIHVTKESTHPVKPLAQIAGNRYASGPVGKALSDACMGTIASFLSKYQDIIIEHQKVVKGNQKRLESLRELAGKENLEYPSVTLPPQPHTKEGVDAYNEVIARVRMWVNLNLWQKLKLSRDDAKPLLRLKGFPSFPLVERQANEVDWWDMVCNVKKLINEKKEDGKVFWQNLAGYKRQEALRPYLSSEEDRKKGKKFARYQLGDLLLHLEKKHGEDWGKVYDEAWERIDKKVEGLSKHIKLEEERRSEDAQSKAALTDWLRAKASFVIEGLKEADKDEFCRCELKLQKWYGDLRGKPFAIEAENSILDISGFSKQYNCAFIWQKDGVKKLNLYLIINYFKGGKLRFKKIKPEAFEANRFYTVINKKSGEIVPMEVNFNFDDPNLIILPLAFGKRQGREFIWNDLLSLETGSLKLANGRVIEKTTYNRRTRQDEPALFVALTFERREVLDSSNIKPMNLIGVDRGENIPAVIALTDPEGCPLSRFKDSLGNPTHILRIGESYKEKQRTIQAKKEVEQRRAGGYSRKYASKAKNLADDMVRNTARDLLYYAVTQDAMLIFENLSRGFGRQGKRTFMAERQYTRMEDWLTAKLAYEGLPSKTYLSKTLAQYTSKTCSNCGFTITSADYDRVLEKLKKTATGWMTTINGKELKVEGQITYYNRYKRQNVVKDLSVELDRLSEESVNNDISSWTKGRSGEALSLLKKRFSHRPVQEKFVCLNCGFETHADEQAALNIARSWLFLRSQEYKKYQTNKTTGNTDKRAFVETWQSFYRKKLKEVWKPAV

SEQ ID NO: 824 - protein, 978 aa, Artificial Sequence
  CasX Variant
QEIKRINKIRRRLVKDSNTKKAGKTGPMKTLLVRVMTPDLRERLENLRKKPENIPQPISNTSRANLNKLLTDYTEMKKAILHVYWEEFQKDPVGLMSRVAQPASKKIDQNKLKPEMDEKGNLTTAGFACSQCGQPLFVYKLEQVSEKGKAYTNYFGRCNVAEHEKLILLAQLKPEKDSDEAVTYSLGKFGQRALDFYSIHVTKESTHPVKPLAQIAGNRYASGPVGKALSDACMGTIASFLSKYQDIIIEHQKVVKGNQKRLESLRELAGKENLEYPSVTLPPQPHTKEGVDAYNEVIARVRMWVNLNLWQKLKLSRDDAKPLLRLKGFPSFPLVERQANEVDWWDMVCNVKKLINEKKEDGKVFWQNLAGYKRQEANRPYLSSEEDRKKGKKFARYQLGDLLLHLEKKHGEDWGKVYDEAWERIDKKVEGLSKHIKLEEERRSEDAQSKAALTDWLRAKASFVIEGLKEADKDEFCRCELKLQKWYGDLRGKPFAIEAENSILDISGFSKQYNCAFIWQKDGVKKLNLYLIINYFKGGKLRFKKIKPEAFEANRFYTVINKKSGEIVPMEVNFNFDDPNLIILPLAFGKRQGREFIWNDLLSLETGSLKLANGRVIEKTLYNRRTRQDEPALFVALTFERREVLDSSNIKPMNLIGVDRGENIPAVIALTDPEGCPLSRFKDSLGNPTHILRIGESYKEKQRTIQAKKEVEQRRAGGYSRKYASKAKNLADDMVRNTARDLLYYAVTQDAMLIFENLSRGFGRQGKRTFMAERQYTRMEDWLTAKLAYEGLPSKTYLSKTLAQYTSKTCSNCGFTITSADYDRVLEKLKKTATGWMTTINGKELKVEGQITYYNRYKRQNVVKDLSVELDRLSEESVNNDISSWTKGRSGEALSLLKKRFSHRPVQEKFVCLNCGFETHADEQAALNIARSWLFLRSQEYKKYQTNKTTGNTDKRAFVETWQSFYRKKLKEVWKPAV

SEQ ID NO: 825 - protein, 978 aa, Artificial Sequence
  CasX Variant
QEIKRINKIRRRLVKDSNTKKAGKTGPMKTLLVRVMTPDLRERLENLRKKPENIPQPISNTSRANLNKLLTDYTEMKKAILHVYWEEFQKDPVGLMSRVAQPASKKIDQNKLKPEMDEKGNLTTAGFACSQCGQPLFVYKLEQVSEKGKAYTNYFGRCNVAEHEKLILLAQLKPEKDSDEAVTYSLGKFGQRALDFYSIHVTKESTHPVKPLAQIAGNRYASGPVGKALSDACMGTIASFLSKYQDIIIEHQKVVKGNQKRLESLRELAGKENLEYPSVTLPPQPHTKEGVDAYNEVIARVRMWVNLNLWQKLKLSRDDAKPLLRLKGFPSFPLVERQANEVDWWDMVCNVKKLINEKKEDGKVFWQNLAGYKRQEALRPYLSSEEDRKKGKKFARYQLGDLLLHLEKKHGEDWGKVYDEAWERIDKKVEGLSKHIKLEELRRSEDAQSKAALTDWLRAKASFVIEGLKEADKDEFCRCELKLQKWYGDLRGKPFAIEAENSILDISGFSKQYNCAFIWQKDGVKKLNLYLIINYFKGGKLRFKKIKPEAFEANRFYTVINKKSGEIVPMEVNFNFDDPNLIILPLAFGKRQGREFIWNDLLSLETGSLKLANGRVIEKTLYNRRTRQDEPALFVALTFERREVLDSSNIKPMNLIGVDRGENIPAVIALTDPEGCPLSRFKDSLGNPTHILRIGESYKEKQRTIQAKKEVEQRRAGGYSRKYASKAKNLADDMVRNTARDLLYYAVTQDAMLIFENLSRGFGRQGKRTFMAERQYTRMEDWLTAKLAYEGLPSKTYLSKTLAQYTSKTCSNCGFTITSADYDRVLEKLKKTATGWMTTINGKELKVEGQITYYNRYKRQNVVKDLSVELDRLSEESVNNDISSWTKGRSGEALSLLKKRFSHRPVQEKFVCLNCGFETHADEQAALNIARSWLFLRSQEYKKYQTNKTTGNTDKRAFVETWQSFYRKKLKEVWKPAV

SEQ ID NO: 826 - protein, 976 aa, Artificial Sequence
  CasX Variant
QEIKRINKIRRRLVKDSNTKKAGKTGPMKTLLVRVMTPDLRERLENLRKKPENIPQPISNTSRANLNKLLTDYTEMKKAILHVYWEEFQKDPVGLMSRVAQPASKKIDQNKLKPEMDEKGNLTTAGFACSQCGQPLFVYKLEQVSEKGKAYTNYFGRCNVAEHEKLILLAQLKPEKDSDEAVTYSLGKFGQRALDFYSIHVTKESTHPVKPLAQIAGNRYASGPVGKALSDACMGTIASFLSKYQDIIIEHQKVVKGNQKRLESLRELAGKENLEYPSVTLPPQPHTKEGVDAYNEVIARVRMWVNLNLWQKLKLSRDDAKPLLRLKGFPSFPLVERQANEVDWWDMVCNVKKLINEKKEDGKVFWQNLAGYKRQEALRPYLSSEEDRKKGKKFARYQLGDLLLHLEKKHGEDWGKVYDEAWERIDKKVEGLSKHIKLEEERRSEDAQSKAALTDWLRAKASFVIEGLKEADKDERCELKLQKWYGDLRGKPFAIEAENSILDISGFSKQYNCAFIWQKDGVKKLNLYLIINYFKGGKLRFKKIKPEAFEANRFYTVINKKSGEIVPMEVNFNFDDPNLIILPLAFGKRQGREFIWNDLLSLETGSLKLANGRVIEKTLYNRRTRQDEPALFVALTFERREVLDSSNIKPMNLIGVDRGENIPAVIALTDPEGCPLSRFKDSLGNPTHILRIGESYKEKQRTIQAKKEVEQRRAGGYSRKYASKAKNLADDMVRNTARDLLYYAVTQDAMLIFENLSRGFGRQGKRTFMAERQYTRMEDWLTAKLAYEGLPSKTYLSKTLAQYTSKTCSNCGFTITSADYDRVLEKLKKTATGWMTTINGKELKVEGQITYYNRYKRQNVVKDLSVELDRLSEESVNNDISSWTKGRSGEALSLLKKRFSHRPVQEKFVCLNCGFETHADEQAALNIARSWLFLRSQEYKKYQTNKTTGNTDKRAFVETWQSFYRKKLKEVWKPAV

SEQ ID NO: 827 - protein, 976 aa, Artificial Sequence
  CasX Variant
QEIKRINKIRRRLVKDSNTKKAGKTGPMKTLLVRVMTPDLRERLENLRKKPENIPQPISNTSRANLNKLLTDYTEMKKAILHVYWEEFQKDPVGLMSRVAQPASKKIDQNKLKPEMDEKGNLTTAGFACSQCGQPLFVYKLEQVSEKGKAYTNYFGRCNVAEHEKLILLAQLKPEKDSDEAVTYSLGKFGQRALDFYSIHVTKESTHPVKPLAQIAGNRYASGPVGKALSDACMGTIASFLSKYQDIIIEHQKVVKGNQKRLESLRELAGKENLEYPSVTLPPQPHTKEGVDAYNEVIARVRMWVNLNLWQKLKLSRDDAKPLLRLKGFPSFPLVERQANEVDWWDMVCNVKKLINEKKEDGKVFWQNLAGYKRALRPYLSSEEDRKKGKKFARYQLGDLLLHLEKKHGEDWGKVYDEAWERIDKKVEGLSKHIKLEEERRSEDAQSKAALTDWLRAKASFVIEGLKEADKDEFCRCELKLQKWYGDLRGKPFAIEAENSILDISGFSKQYNCAFIWQKDGVKKLNLYLIINYFKGGKLRFKKIKPEAFEANRFYTVINKKSGEIVPMEVNFNFDDPNLIILPLAFGKRQGREFIWNDLLSLETGSLKLANGRVIEKTLYNRRTRQDEPALFVALTFERREVLDSSNIKPMNLIGVDRGENIPAVIALTDPEGCPLSRFKDSLGNPTHILRIGESYKEKQRTIQAKKEVEQRRAGGYSRKYASKAKNLADDMVRNTARDLLYYAVTQDAMLIFENLSRGFGRQGKRTFMAERQYTRMEDWLTAKLAYEGLPSKTYLSKTLAQYTSKTCSNCGFTITSADYDRVLEKLKKTATGWMTTINGKELKVEGQITYYNRYKRQNVVKDLSVELDRLSEESVNNDISSWTKGRSGEALSLLKKRFSHRPVQEKFVCLNCGFETHADEQAALNIARSWLFLRSQEYKKYQTNKTTGNTDKRAFVETWQSFYRKKLKEVWKPAV

SEQ ID NO: 828 - protein, 978 aa, Artificial Sequence
  CasX Variant
QEIKRINKIRRRLVKDSNTKKAGKTGPMKTLLVRVMTPDLRERLENLRKKPENIPQPISNTSRANLNKLLTDYTEMKKAILHVYWEEFQKDPVGLMSRVAQPASKKIDQNKLKPEMDEKGNLTTAGFACSQCGQPLFVYKLEQVSEKGKAYTNYFGRCNVAEHEKLILLAQLKPEKDSDEAVTYSLGKFGQRALDFYSIHVTKESTHPVKPLAQIAGNRYASGPVGKALSDACMGTIASFLSKYQDIIIEHQKVVKGNQKRLESLRELAGKENLEYPSVTLPPQPHTKEGVDAYNEVIARVRMWVNLNLWQKLKLSRDDAKPLLRLKGFPSFPLVERQANEVDWWDMVCNVKKLINEKKEDGKVFWQNLAGYKRQEALRPYLSSEEDRQKGKKFARYQLGDLLLHLEKKHGEDWGKVYDEAWERIDKKVEGLSKHIKLEEERRSEDAQSKAALTDWLRAKASFVIEGLKEADKDEFCRCELKLQKWYGDLRGKPFAIEAENSILDISGFSKQYNCAFIWQKDGVKKLNLYLIINYFKGGKLRFKKIKPEAFEANRFYTVINKKSGEIVPMEVNFNFDDPNLIILPLAFGKRQGREFIWNDLLSLETGSLKLANGRVIEKTLYNRRTRQDEPALFVALTFERREVLDSSNIKPMNLIGVDRGENIPAVIALTDPEGCPLSRFKDSLGNPTHILRIGESYKEKQRTIQAKKEVEQRRAGGYSRKYASKAKNLADDMVRNTARDLLYYAVTQDAMLIFENLSRGFGRQGKRTFMAERQYTRMEDWLTAKLAYEGLPSKTYLSKTLAQYTSKTCSNCGFTITSADYDRVLEKLKKTATGWMTTINGKELKVEGQITYYNRYKRQNVVKDLSVELDRLSEESVNNDISSWTKGRSGEALSLLKKRFSHRPVQEKFVCLNCGFETHADEQAALNIARSWLFLRSQEYKKYQTNKTTGNTDKRAFVETWQSFYRKKLKEVWKPAV

SEQ ID NO: 829 - protein, 978 aa, Artificial Sequence
  CasX Variant
QEIKRLNKIRRRLVKDSNTKKAGKTGPMKTLLVRVMTPDLRERLENLRKKPENIPQPISNTSRANLNKLLTDYTEMKKAILHVYWEEFQKDPVGLMSRVAQPASKKIDQNKLKPEMDEKGNLTTAGFACSQCGQPLFVYKLEQVSEKGKAYTNYFGRCNVAEHEKLILLAQLKPEKDSDEAVTYSLGKFGQRALDFYSIHVTKESTHPVKPLAQIAGNRYASGPVGKALSDACMGTIASFLSKYQDIIIEHQKVVKGNQKRLESLRELAGKENLEYPSVTLPPQPHTKEGVDAYNEVIARVRMWVNLNLWQKLKLSRDDAKPLLRLKGFPSFPLVERQANEVDWWDMVCNVKKLINEKKEDGKVFWQNLAGYKRQEALRPYLSSEEDRKKGKKFARYQLGDLLLHLEKKHGEDWGKVYDEAWERIDKKVEGLSKHIKLEEERRSEDAQSKAALTDWLRAKASFVIEGLKEADKDEFCRCELKLQKWYGDLRGKPFAIEAENSILDISGFSKQYNCAFIWQKDGVKKLNLYLIINYFKGGKLRFKKIKPEAFEANRFYTVINKKSGEIVPMEVNFNFDDPNLIILPLAFGKRQGREFIWNDLLSLETGSLKLANGRVIEKTLYNRRTRQDEPALFVALTFERREVLDSSNIKPMNLIGVDRGENIPAVIALTDPEGCPLSRFKDSLGNPTHILRIGESYKEKQRTIQAKKEVEQRRAGGYSRKYASKAKNLADDMVRNTARDLLYYAVTQDAMLIFENLSRGFGRQGKRTFMAERQYTRMEDWLTAKLAYEGLPSKTYLSKTLAQYTSKTCSNCGFTITSADYDRVLEKLKKTATGWMTTINGKELKVEGQITYYNRYKRQNVVKDLSVELDRLSEESVNNDISSWTKGRSGEALSLLKKRFSHRPVQEKFVCLNCGFETHADEQAALNIARSWLFLRSQEYKKYQTNKTTGNTDKRAFVETWQSFYRKKLKEVWKPAV

SEQ ID NO: 830 - protein, 978 aa, Artificial Sequence
  CasX Variant
QEIKRINKIRRRLVKDSNTKKAGKTGPMKTLLVRVMTPDLRERLENLRKKPENIPQPISNTSRANLNKLLTDYTEMKKAILHVYWEEFQKDPVGLMSRVAQPASKKIDQNKLKPEMDEKGNLTTAGFACSQCGQPLFVYKLEQVSEKGKAYTNYFGRCNVAEHEKLILLAQLKPEKDSDEAVTYSLGKFGQRALDFYSIHVTKESTHPVKPLAQIAGNRYASGPVGKALSDACMGTIASFLSKYQDIIIEHQKVVKGNQKRLESLRELAGKENLEYPSVTLPPQPHTKEGVDAYNEVIARVRMWVNLNLWQKLKLSRDDAKPLLRLKGFPSFPLVERQANEVDWWDMVCNVKKLINEKKEDGKVFWQNLAGYKRQEALRPYLSSEEDRKKGKKFARYQLGDLLLHLEKKHGEDWGKVYDEAWERIDKKVEGLSKHIKLEEERRSEDAQSKAALTDWLDAKASFVIEGLKEADKDEFCRCELKLQKWYGDLRGKPFAIEAENSILDISGFSKQYNCAFIWQKDGVKKLNLYLIINYFKGGKLRFKKIKPEAFEANRFYTVINKKSGEIVPMEVNFNFDDPNLIILPLAFGKRQGREFIWNDLLSLETGSLKLANGRVIEKTLYNRRTRQDEPALFVALTFERREVLDSSNIKPMNLIGVDRGENIPAVIALTDPEGCPLSRFKDSLGNPTHILRIGESYKEKQRTIQAKKEVEQRRAGGYSRKYASKAKNLADDMVRNTARDLLYYAVTQDAMLIFENLSRGFGRQGKRTFMAERQYTRMEDWLTAKLAYEGLPSKTYLSKTLAQYTSKTCSNCGFTITSADYDRVLEKLKKTATGWMTTINGKELKVEGQITYYNRYKRQNVVKDLSVELDRLSEESVNNDISSWTKGRSGEALSLLKKRFSHRPVQEKFVCLNCGFETHADEQAALNIARSWLFLRSQEYKKYQTNKTTGNTDKRAFVETWQSFYRKKLKEVWKPAV

SEQ ID NO: 831 - protein, 976 aa, Artificial Sequence
  CasX Variant
QEIKRINKIRRRLVKDSNTKKAGKTGPMKTLLVRVMTPDLRERLENLRKKPENIPQPISNTSRANLNKLLTDYTEMKKAILHVYWEEFQKDPVGLMSRVAQPASKKIDQNKLKPEMDEKGNLTTAGFACSQCGQPLFVYKLEQVSEKGKAYTNYFGRCNVAEHEKLILLAQLKPEKDSDEAVTYSLGKFGQRALDFYSIHVTKESTHPVKPLAQIAGNRYASGPVGKALSDACMGTIASFLSKYQDIIIEHQKVVKGNQKRLESLRELAGKENLEYPSVTLPPQPHTKEGVDAYNEVIARVRMWVNLNLWQKLKLSRDDAKPLLRLKGFPSFPLVERQANEVDWWDMVCNVKKLINEKKEDGKVFWQNLAGYKRQEALRPYLSSEEDRKKGKKFARYQLGDLLLHLEKKHGEDWGKVYDEAWERIDKKVEGLSKHIKLEEERRSEDAQSKAALTDWLRAKASFVIEGLKEADKDEFCRCELKLQKWYGDLRGKPFAIEAENSDISGFSKQYNCAFIWQKDGVKKLNLYLIINYFKGGKLRFKKIKPEAFEANRFYTVINKKSGEIVPMEVNFNFDDPNLIILPLAFGKRQGREFIWNDLLSLETGSLKLANGRVIEKTLYNRRTRQDEPALFVALTFERREVLDSSNIKPMNLIGVDRGENIPAVIALTDPEGCPLSRFKDSLGNPTHILRIGESYKEKQRTIQAKKEVEQRRAGGYSRKYASKAKNLADDMVRNTARDLLYYAVTQDAMLIFENLSRGFGRQGKRTFMAERQYTRMEDWLTAKLAYEGLPSKTYLSKTLAQYTSKTCSNCGFTITSADYDRVLEKLKKTATGWMTTINGKELKVEGQITYYNRYKRQNVVKDLSVELDRLSEESVNNDISSWTKGRSGEALSLLKKRFSHRPVQEKFVCLNCGFETHADEQAALNIARSWLFLRSQEYKKYQTNKTTGNTDKRAFVETWQSFYRKKLKEVWKPAV

SEQ ID NO: 832 - protein, 978 aa, Artificial Sequence
  CasX Variant
QEIKRINKIRRRLVKDSNTKKAGKTGPMKTLLVRVMTPDLRERLENLRKKPENIPQPISNTSRANLNKLLTDYTEMKKAILHVYWEEFQKDPVGLMSRVAQPASKKIDQNKLKPEMDEKGNLTTAGFACSQCGQPLFVYKLEQVSEKGKAYTNYVGRCNVAEHEKLILLAQLKPEKDSDEAVTYSLGKFGQRALDFYSIHVTKESTHPVKPLAQIAGNRYASGPVGKALSDACMGTIASFLSKYQDIIIEHQKVVKGNQKRLESLRELAGKENLEYPSVTLPPQPHTKEGVDAYNEVIARVRMWVNLNLWQKLKLSRDDAKPLLRLKGFPSFPLVERQANEVDWWDMVCNVKKLINEKKEDGKVFWQNLAGYKRQEALRPYLSSEEDRKKGKKFARYQLGDLLLHLEKKHGEDWGKVYDEAWERIDKKVEGLSKHIKLEEERRSEDAQSKAALTDWLRAKASFVIEGLKEADKDEFCRCELKLQKWYGDLRGKPFAIEAENSILDISGFSKQYNCAFIWQKDGVKKLNLYLIINYFKGGKLRFKKIKPEAFEANRFYTVINKKSGEIVPMEVNFNFDDPNLIILPLAFGKRQGREFIWNDLLSLETGSLKLANGRVIEKTLYNRRTRQDEPALFVALTFERREVLDSSNIKPMNLIGVDRGENIPAVIALTDPEGCPLSRFKDSLGNPTHILRIGESYKEKQRTIQAKKEVEQRRAGGYSRKYASKAKNLADDMVRNTARDLLYYAVTQDAMLIFENLSRGFGRQGKRTFMAERQYTRMEDWLTAKLAYEGLPSKTYLSKTLAQYTSKTCSNCGFTITSADYDRVLEKLKKTATGWMTTINGKELKVEGQITYYNRYKRQNVVKDLSVELDRLSEESVNNDISSWTKGRSGEALSLLKKRFSHRPVQEKFVCLNCGFETHADEQAALNIARSWLFLRSQEYKKYQTNKTTGNTDKRAFVETWQSFYRKKLKEVWKPAV

SEQ ID NO: 833 - protein, 979 aa, Artificial Sequence
  CasX Variant
QEIKRINKIRRRLVKDSNTKKAGKTGPMKTLLVRVMTPDLRERLENLRKKPENIPQPISNTSRANLNKLLTDYTEMKKAILHVYWEEFQKDPVGLMSRVAQPASKKIDQNKLKPEMDEKGNLTTAGFACSQCGQPLFVYKLEQVSEKGKAYTNYFGRCNVAEHEKLILLAQLKPEKDSDEAVTYSLGKFGQRALDFYSIHVTKESTHPVKPLAQIAGNRYASGPVGKALSDACMGTIASFLSKYQDIIIEHQKVVKGNQKRLESLRELAGKENLEYPSVTLPPQPHTKEGVDAYNEVIARVRMWVNLNLWQKLKLSRDDAKPLLRLKGFPSFPLVERQANEVDWWDMVCNVKKLINGEKKEDGKVFWQNLAGYKRQEALRPYLSSEEDRKKGKKFARYQLGDLLLHLEKKHGEDWGKVYDEAWERIDKKVEGLSKHIKLEEERRSEDAQSKAALTDWLRAKASFVIEGLKEADKDEFCRCELKLQKWYGDLRGKPFAIEAENSILDISGFSKQYNCAFIWQKDGVKKLNLYLIINYFKGGKLRFKKIKPEAFEANRFYTVINKKSGEIVPMEVNFNFDDPNLIILPLAFGKRQGREFIWNDLLSLETGSLKLANGRVIEKTLYNRRTRQDEPALFVALTFERREVLDSSNIKPMNLIGVDRGENIPAVIALTDPEGCPLSRFKDSLGNPTHILRIGESYKEKQRTIQAKKEVEQRRAGGYSRKYASKAKNLADDMVRNTARDLLYYAVTQDAMLIFENLSRGFGRQGKRTFMAERQYTRMEDWLTAKLAYEGLPSKTYLSKTLAQYTSKTCSNCGFTITSADYDRVLEKLKKTATGWMTTINGKELKVEGQITYYNRYKRQNVVKDLSVELDRLSEESVNNDISSWTKGRSGEALSLLKKRFSHRPVQEKFVCLNCGFETHADEQAALNIARSWLFLRSQEYKKYQTNKTTGNTDKRAFVETWQSFYRKKLKEVWKPAV

SEQ ID NO: 834 - protein, 978 aa, Artificial Sequence
  CasX Variant
QEIKRINKIRRRLVKDSNTKKAGKTGPMKTLLVRVMTPDLRERLENLRKKPENIPQPISNTSRANLNKLLTDYTEMKKAILHVYWEEFQKDPVGLMSRVAQPASKKIDQNKLKPEMDEKGNLTTAGFACSQCGQPLFVYKLEQVSEKGKAYTNYFGRCNVAEHEKLILLAQLKPEKDSDEAVTYSLGKFGQRALDFYSIHVTKESTHPVKPLAQIAGNRFASGPVGKALSDACMGTIASFLSKYQDIIIEHQKVVKGNQKRLESLRELAGKENLEYPSVTLPPQPHTKEGVDAYNEVIARVRMWVNLNLWQKLKLSRDDAKPLLRLKGFPSFPLVERQANEVDWWDMVCNVKKLINEKKEDGKVFWQNLAGYKRQEALRPYLSSEEDRKKGKKFARYQLGDLLLHLEKKHGEDWGKVYDEAWERIDKKVEGLSKHIKLEEERRSEDAQSKAALTDWLRAKASFVIEGLKEADKDEFCRCELKLQKWYGDLRGKPFAIEAENSILDISGFSKQYNCAFIWQKDGVKKLNLYLIINYFKGGKLRFKKIKPEAFEANRFYTVINKKSGEIVPMEVNFNFDDPNLIILPLAFGKRQGREFIWNDLLSLETGSLKLANGRVIEKTLYNRRTRQDEPALFVALTFERREVLDSSNIKPMNLIGVDRGENIPAVIALTDPEGCPLSRFKDSLGNPTHILRIGESYKEKQRTIQAKKEVEQRRAGGYSRKYASKAKNLADDMVRNTARDLLYYAVTQDAMLIFENLSRGFGRQGKRTFMAERQYTRMEDWLTAKLAYEGLPSKTYLSKTLAQYTSKTCSNCGFTITSADYDRVLEKLKKTATGWMTTINGKELKVEGQITYYNRYKRQNVVKDLSVELDRLSEESVNNDISSWTKGRSGEALSLLKKRFSHRPVQEKFVCLNCGFETHADEQAALNIARSWLFLRSQEYKKYQTNKTTGNTDKRAFVETWQSFYRKKLKEVWKPAV

SEQ ID NO: 835 - protein, 978 aa, Artificial Sequence
  CasX Variant
QEIKRINKIRRRLVKDSNTKKAGKTGPMKTLLVRVMTPDLRERLENLRKKPENIPQPISNTSRANLNKLLTDYTEMKKAILHVYWEEFQKDPVGLMSRVAQPASKKIDQNKLKPEMDEKGNLTTAGFACSQCGQPLFVYKLEQVSEKGKAYTNYFGRCNVAEHEKLILLAQLKPEKDSDEAVTYSLGKFGQRALDFYSIHVTKESTHPVKPLAQIAGNRYASGPVGKALSDACMGTIASFLSKYQDIIIEHQKVVKGNQKRLESLRELAGKENLEYPSVTLPPQPHTKEGVDAYNEVIARVRMWVNLNLWQKLKLSRDDAKPLLRLKGFPSFPLVERQANEVDWWDMVCNVKKLINEKKEDGKVFWQNLAGYKRQEALRPYLSSEEDRKKGKKFARYQLGDLLLHLEKKHGEDWGKVYDEAWERIDKKVEGLSKHIKLEEERRSEDAQSKAALTDWLRAKASFVIEGLKEADKDEFCRCELKLQKWYGDLRGKPFAIEAENSILDISGFSKQYNCAFIWQKDGVKKLNLYLIINYFKGGKLRFKKIKPEAFEANRFYTVINKKSGEIVPMEVNFNFDDPNLIILPLAFGKRQGREFIWNDLLSLETGSLKLANGRVIEKTLYNRRTRQDEPALFVALTFERREVLDSSNIKPMNLIGVDRGENIPAVIALTDPEGCPLSRFKDSLGNPTHILRIGESYKEKQRTIQAKKEVEQRRAGGYSRKYASKAKNLADDMVRNTARDLLYYAVTQDAMLIFENLSRGFGRQGKRTFMAERQYTRMEDWYTAKLAYEGLPSKTYLSKTLAQYTSKTCSNCGFTITSADYDRVLEKLKKTATGWMTTINGKELKVEGQITYYNRYKRQNVVKDLSVELDRLSEESVNNDISSWTKGRSGEALSLLKKRFSHRPVQEKFVCLNCGFETHADEQAALNIARSWLFLRSQEYKKYQTNKTTGNTDKRAFVETWQSFYRKKLKEVWKPAV

SEQ ID NO: 836 - protein, 979 aa, Artificial Sequence
  CasX Variant
QEIKRINKIRRRLVKDSNTKKAGKTGPMKTLLVRVMTPDLRERLENLRKKPENIPQPISNTSRANLNKLLTDYTEMKKAILHVYWEEFQKDPVGLMSRVAQPASKKIDQNKLKPEMDEKGNLTTAGFACSQCGQPLFVYKLEQVSEKGKAYTNYFGRCNVAEHEKLILLAQLKPEKDSDEAVTYSLGKFGQRALDFYSIHVTKESTHPVKPLAQIAGNRYASGPVGKALSDACMGTIASFLSKYQDIIIEHQKVVKGNQKRLESLRELAGKENLEYPSVTLPPQPHTKEGVDAYNEVIARVRMWVNLNLWQKLKLSRDDAKPLLRLKGFPSFPLVERQANEVDWWDMVPCNVKKLINEKKEDGKVFWQNLAGYKRQEALRPYLSSEEDRKKGKKFARYQLGDLLLHLEKKHGEDWGKVYDEAWERIDKKVEGLSKHIKLEEERRSEDAQSKAALTDWLRAKASFVIEGLKEADKDEFCRCELKLQKWYGDLRGKPFAIEAENSILDISGFSKQYNCAFIWQKDGVKKLNLYLIINYFKGGKLRFKKIKPEAFEANRFYTVINKKSGEIVPMEVNFNFDDPNLIILPLAFGKRQGREFIWNDLLSLETGSLKLANGRVIEKTLYNRRTRQDEPALFVALTFERREVLDSSNIKPMNLIGVDRGENIPAVIALTDPEGCPLSRFKDSLGNPTHILRIGESYKEKQRTIQAKKEVEQRRAGGYSRKYASKAKNLADDMVRNTARDLLYYAVTQDAMLIFENLSRGFGRQGKRTFMAERQYTRMEDWLTAKLAYEGLPSKTYLSKTLAQYTSKTCSNCGFTITSADYDRVLEKLKKTATGWMTTINGKELKVEGQITYYNRYKRQNVVKDLSVELDRLSEESVNNDISSWTKGRSGEALSLLKKRFSHRPVQEKFVCLNCGFETHADEQAALNIARSWLFLRSQEYKKYQTNKTTGNTDKRAFVETWQSFYRKKLKEVWKPAV

SEQ ID NO: 837 - protein, 979 aa, Artificial Sequence
  CasX Variant
QEIKRINKIRRRLVKDSNTKKAGKTGPMKTLLVRVMTPDLRERLENLRKKPENIPQPISNTSRANLNKLLTDYTEMKKAILHVYWEEFQKDPVGLMSRVAQPASKKIDQNKLKPEMDEKGNLTTAGFACSQCGQPLFVYKLEQVSEKGKAYTNYFGRCNVAEHEKLILLAQLKPEKDSDEAVTYSLGKFGQRALDFYSIHVTKESTHPVKPLAQTIAGNRYASGPVGKALSDACMGTIASFLSKYQDIIIEHQKVVKGNQKRLESLRELAGKENLEYPSVTLPPQPHTKEGVDAYNEVIARVRMWVNLNLWQKLKLSRDDAKPLLRLKGFPSFPLVERQANEVDWWDMVCNVKKLINEKKEDGKVFWQNLAGYKRQEALRPYLSSEEDRKKGKKFARYQLGDLLLHLEKKHGEDWGKVYDEAWERIDKKVEGLSKHIKLEEERRSEDAQSKAALTDWLRAKASFVIEGLKEADKDEFCRCELKLQKWYGDLRGKPFAIEAENSILDISGFSKQYNCAFIWQKDGVKKLNLYLIINYFKGGKLRFKKIKPEAFEANRFYTVINKKSGEIVPMEVNFNFDDPNLIILPLAFGKRQGREFIWNDLLSLETGSLKLANGRVIEKTLYNRRTRQDEPALFVALTFERREVLDSSNIKPMNLIGVDRGENIPAVIALTDPEGCPLSRFKDSLGNPTHILRIGESYKEKQRTIQAKKEVEQRRAGGYSRKYASKAKNLADDMVRNTARDLLYYAVTQDAMLIFENLSRGFGRQGKRTFMAERQYTRMEDWLTAKLAYEGLPSKTYLSKTLAQYTSKTCSNCGFTITSADYDRVLEKLKKTATGWMTTINGKELKVEGQITYYNRYKRQNVVKDLSVELDRLSEESVNNDISSWTKGRSGEALSLLKKRFSHRPVQEKFVCLNCGFETHADEQAALNIARSWLFLRSQEYKKYQTNKTTGNTDKRAFVETWQSFYRKKLKEVWKPAV

SEQ ID NO: 838 - protein, 978 aa, Artificial Sequence
  CasX Variant
QEIKRINKIRRRLVKDSNTKKAGKTGPMKTLLVRVMTPDLRERLENLRKKPENIPQPISNTSRANLNKLLTDYTEMKKAILHVYWEEFQKDPVGLMSRVAQPASKKIDQNKLKPEMDEKGNLTTAGFACSQCGQPLFVYKLEQVSEKGKAYTNYFGRCNVAEHEKLILLAQLKPEKDSDEAVTYSLGKFGQRALDFYSIHVTKESTHPVKPLAQIAGNRYASGPVGKALSDACMGTIASFLSKYQDIIIEHQKVVKGNQKRLESLRELAGKENLEYPSVTLPPQPHTKEGVDAYNEVIARVRMWVNLNLWQKLKLSRDDAKPLLRLKGFPSFPLVERQANEVDWWDMVCNVKKLINEKKEDGKVFWQNLAGYKRQEALRPYLSSEEDRKKGKKFARYQLGDLLLHLEKKHGEDWGKVYDEAWERIDKKVEGLSKHIKLEEERRSEDAQSKAALTDWLRAKASFVIEGLKEADKDEFCRCELKLQKWYGDLRGKPFAIEAENSILDISGFSKQYNCAFIWQKDGVKKLNLYLIINYFKGGKLRFKKIKPEAFEANRFYTVINKKSGEIVPMEVNFNFDDPNLIILPLAFGKRQGREFIWNDLLSLETGSLKLANGRVIEKTLYNRRTRQDEPALFVALTFERREVLDSSNIKPMNLIGVDRGENIPAVIALTDPEGCPLSRFKDSLGNPTHILRIGESYKEKQRTIQAKKEVEQRRAGGYSRKYASKAKNLADDMVRNTARDLLYYAVTQDAMLIFENLSRGFGRQGKRTFMAERQYTRMEDWLTAKLAYEGLPSKTYLSKTLAQYTSKTCSNCGFTITSADYDRVLEKLKKTATGWMTTINGKELKVEGQITYYNRYKRQNVVKDLSVELDRLSEESVNNDISSWTKGRSGEALSLLKKRFSHRPCQEKFVCLNCGFETHADEQAALNIARSWLFLRSQEYKKYQTNKTTGNTDKRAFVETWQSFYRKKLKEVWKPAV

SEQ ID NO: 839 - protein, 979 aa, Artificial Sequence
  CasX Variant
QEIKRINKIRRRLVKDSNTKKAGKTGPMKTLLVRVMTPDLRERLENLPRKKPENIPQPISNTSRANLNKLLTDYTEMKKAILHVYWEEFQKDPVGLMSRVAQPASKKIDQNKLKPEMDEKGNLTTAGFACSQCGQPLFVYKLEQVSEKGKAYTNYFGRCNVAEHEKLILLAQLKPEKDSDEAVTYSLGKFGQRALDFYSIHVTKESTHPVKPLAQIAGNRYASGPVGKALSDACMGTIASFLSKYQDIIIEHQKVVKGNQKRLESLRELAGKENLEYPSVTLPPQPHTKEGVDAYNEVIARVRMWVNLNLWQKLKLSRDDAKPLLRLKGFPSFPLVERQANEVDWWDMVCNVKKLINEKKEDGKVFWQNLAGYKRQEALRPYLSSEEDRKKGKKFARYQLGDLLLHLEKKHGEDWGKVYDEAWERIDKKVEGLSKHIKLEEERRSEDAQSKAALTDWLRAKASFVIEGLKEADKDEFCRCELKLQKWYGDLRGKPFAIEAENSILDISGFSKQYNCAFIWQKDGVKKLNLYLIINYFKGGKLRFKKIKPEAFEANRFYTVINKKSGEIVPMEVNFNFDDPNLIILPLAFGKRQGREFIWNDLLSLETGSLKLANGRVIEKTLYNRRTRQDEPALFVALTFERREVLDSSNIKPMNLIGVDRGENIPAVIALTDPEGCPLSRFKDSLGNPTHILRIGESYKEKQRTIQAKKEVEQRRAGGYSRKYASKAKNLADDMVRNTARDLLYYAVTQDAMLIFENLSRGFGRQGKRTFMAERQYTRMEDWLTAKLAYEGLPSKTYLSKTLAQYTSKTCSNCGFTITSADYDRVLEKLKKTATGWMTTINGKELKVEGQITYYNRYKRQNVVKDLSVELDRLSEESVNNDISSWTKGRSGEALSLLKKRFSHRPVQEKFVCLNCGFETHADEQAALNIARSWLFLRSQEYKKYQTNKTTGNTDKRAFVETWQSFYRKKLKEVWKPAV

SEQ ID NO: 840 - protein, 978 aa, Artificial Sequence
  CasX Variant
QEIKRINKIRRRLVKDSNTKKAGKTGPMKTLLVRVMTPDLRERLENLRKKPENIPQPISNTSRANLNKLLTDYTEMKKAILHVYWEEFQKDPVGLMSRVAQPASKKIDQNKLKPEMDEKGNLTTAGFACSQCGQPLFVYKLEQVSEKGKAYTNYFGRCNVAEHEKLILLAQLKPEKDSDEAVTYSLGKFGQRALDFYSIHVTKESTHPVKPLAQIAGNRYASGPVGKALSDACMGTIASFLSKYQDIIIEHQKVVKGNQKRLESLRELAGKENLEYPSVTLPPQPHTKEGVDAYNEVIARVRMWVNLNLWQKLKLSRDDAKPLLRLKGFPSFPLVERQANEVDWWDMVCNVKKLINEKKEDGKVFWQNLAGYKRQEALRPYLSSEEDRKKGKKFARYQLGDLLLHLEKKHGEDWGKVYDEAWERIDKKVEGLSKHIKLEEERRSEDAQSKAALTDWLRAKASFVIEGLKEADKDEFCRCELKLQKWYGDLRGKPFAIEAENSILDISGFSKQYNCAFIWQKDGVKKLNLYLIINYFKGGKLRFKKIKPEAFEANRFYTVINKKSGEIVPMEVNFNFDDPNLIILPLAFGKRQGREFIWNDLLSLETGSLKLANGRVIEKTLYNRRTRQDEPALFVALTFERREVLDSSNIKPMNLIGVDRGENIPAVIALTDPEGCPLSRFKDSLGNPTHILRIGESYKEKQRTIQAKKEVEQRRAGGYSRKYASKAKNLADDMVRNTARDLLYYAVTQDAMLIFENLSRGFGRQGKRTFMAERQYTRMEDWLTAKLAYEGLPSKTYLSKTLAQYTSKTCSNCGFTITSADYDRVLEGLKKTATGWMTTINGKELKVEGQITYYNRYKRQNVVKDLSVELDRLSEESVNNDISSWTKGRSGEALSLLKKRFSHRPVQEKFVCLNCGFETHADEQAALNIARSWLFLRSQEYKKYQTNKTTGNTDKRAFVETWQSFYRKKLKEVWKPAV

SEQ ID NO: 841 - protein, 977 aa, Artificial Sequence
  CasX Variant
QEIKRINKIRRRLVKDSNTKKAGKTGPMKTLLVRVMTPDLRERLENLRKKPENIPQPISNTSRANLNKLLTDYTEMKKAILHVYWEEFQKDPVGLMSRVAQPASKKIDQNKLKPEMDEKGNLTTAGFACSQCGQPLFVYKLEQVSEKGKAYTNYFGRCNVAEHEKLILLAQLKPEKDSDEAVTYSLGKFGQRALDFYSIHVTKESTHPVKPLAQIAGNRYASGPVGKALSDACMGTIASFLSKYQDIIIEHQKVVKGNQKRLESLRELAGKENLEYPSVTLPPQPHTKEGVDAYNEVIARVRMWVNLNLWQKLKLSRDDAKPLLRLKGFPSFPLVERQANEVDWWDMVCNVKKLINEKKEDGKVFWQNLAGYKRQEALRPYLSSEEDRKKGKKFARYQLGDLLLHLEKKHGEDWGKVYDEAWERIDKKVEGLSKHIKLEEERRSEDAQSKAALTDWLRAKASFVIEGLKEADKDEFCRCELKLQKWYGDLRGKPFAIEAENSILDISGFSKQYNCAFIWQKDGVKKLNLYLIINYFKGGKLRFKKIKPEAFEANRFYTVINKKSGEIVPMEVNFNFDDPNLIILPLAFGKRQGREFIWNDLLSLETGSLKLANGRVIEKTLYNRRTRQDEPALFVALTFERREVLDSSNIKPMNLIGVDRGENIPAVIALTDPEGCPLSRFKDSLGNPTHILRIGESYKEKQRTIQAKKEVEQRRAGGYSRKYASKAKNLADDMVRNTARDLLYYAVTQDAMLIFENLSRGFGRQGKRTFMAERQYTRMEDWLTAKLAYEGLPSKTYLSKTLAQTSKTCSNCGFTITSADYDRVLEKLKKTATGWMTTINGKELKVEGQITYYNRYKRQNVVKDLSVELDRLSEESVNNDISSWTKGRSGEALSLLKKRFSHRPVQEKFVCLNCGFETHADEQAALNIARSWLFLRSQEYKKYQTNKTTGNTDKRAFVETWQSFYRKKLKEVWKPAV

SEQ ID NO: 842 - protein, 979 aa, Artificial Sequence
  CasX Variant
QEIKRINKIRRRLVKDSNTKKAGKTGPMKTLLVRVMTPDLRERLENLRKKPENIPQPISNTSRANLNKLLTDYTEMKKAILHVYWEEFQKDPVGLMSRVAQPASKKIDQNKLKPEMDEKGNLTTAGFACSQCGQPLFVYKLEQVSEKGKAYTNYFGRCNVAEHEKLILLAQLKPEKDSDEAVTYSLGKFGQRALDFYSIHVTKESTHPVKPLAQIAGNRYASGPVGKALSDACMGTIASFLSKYQDIIIEHQKVVKGNQKRLESLRELAGKENLEYPSVTLPPQPHTKEGVDAYNEVIARVRMWVNLNLWQKLKLSRDDAKPLLRLKGFPSFPLVERQANEVDWWDMVCNVKKLINEKKEDGKVFWQNLAGYKRQEALRPYLSSEEDRKKGKKFARYQLGDLLLHLEKKHGEDWGKVYDEAWERIDKKVEGLSKHIKLEEERRSEDAQSKAALTDWLRAKASFVIEGLKEADKDEFCRCELKLQKWYGDLRGKPFAIEAENSILDISGFSKQYNCAFIWQKDGVKKLNLYLIINYFKGGKLRFKKIKPEAFEANRFYTVINKKSGEIVPMEVNFNFDDPNLIILPLAFGKRQGREFIWNDLLSLETGSLKLANGRVIEKTLYNRRTRQDEPALFVALTFERREVLDSSNIKPMNLIGVDRGENIPAVIALTDPEGCPLSRFKDSLGNPTHILRIGESYKEKQRTIQAKKEVEQRRAGGYSRKYASKAKNLADDMVRNTARDLLYYAVTQDAMLIFENLSRGFGRQGKRTFMAERQYTRMEDWLTAKLAYEGLPSKTYLSKTLAQYTISKTCSNCGFTITSADYDRVLEKLKKTATGWMTTINGKELKVEGQITYYNRYKRQNVVKDLSVELDRLSEESVNNDISSWTKGRSGEALSLLKKRFSHRPVQEKFVCLNCGFETHADEQAALNIARSWLFLRSQEYKKYQTNKTTGNTDKRAFVETWQSFYRKKLKEVWKPAV

SEQ ID NO: 843 - protein, 978 aa, Artificial Sequence
  CasX Variant
QEIKRINKIRRRLVKDSNTKKAGKTGPMKTLLVRVMTPDLRERLENLRKKPENIPQPISNTSRANLNKLLTDYTEMKKAILHVYWEEFQKDPVGLMSRVAQPASKKIDQNKLKPEMDEKGNLTTAGFACSQCGQPLFVYKLEQVSEKGKAYTNYFGRCNVAEHEKLILLAQLKPEKDSDEAVTYSLGKFGQRALDFYSIHVTKESTHPVKPLAQIAGNRYASGPVGKALSDACMGTIASFLSKYQDIIIEHQKVVKGNQKRLESLRELAGKENLEYPSVTLPPQPHTKEGVDAYNEVIARVRMWVNLNLWQKLKLSRDDAKPLLRLKGFPSFPLVERQANEVDWWDMVCNVKKLINEKKEDGKVFWQNLAGYKRQEALRPYLSSEEDRKKGKKFARYQLGDLLLHLEKKHGEDWGKVYDEAWERIDKKVEGLSKHIKLEEERRSEDAQSKAALTDWLRAKASFVIEGLKEADKDEFCRCELKLQKWYGDLRGKPFAIEAENSILDISGFSKQYNCAFIWQKDGVKKLNLYLIINYFKGGKLRFKKIKPEAFEANRFYTVINKKSGEIVPMEVNFNFDDPNLIILPLAFGKRQGREFIWNDLLSLETGSLKLANGRVIEKTLYNRRTRQDEPALFVALTFERREVLDSSNIKPMNLIGVDRGENIPAVIALTDPEGCPLSRFKDSLGNPTHILRIGESYKEKQRTIQAKKEVEQRRAGGYSRKYASKAKNLADDMVRNTARDLLYYAVTQDAMLIFENLSRGFGRQGKRTFMAERQYTRMEDWLTAKLAYEGLPSKTYLSKTLAQYTSKTKSNCGFTITSADYDRVLEKLKKTATGWMTTINGKELKVEGQITYYNRYKRQNVVKDLSVELDRLSEESVNNDISSWTKGRSGEALSLLKKRFSHRPVQEKFVCLNCGFETHADEQAALNIARSWLFLRSQEYKKYQTNKTTGNTDKRAFVETWQSFYRKKLKEVWKPAV

SEQ ID NO: 844 - protein, 978 aa, Artificial Sequence
  CasX Variant
QEIKRINKIRRRLVKDSNTKKAGKTGPMKTLLVRVMTPDLRERLENLRKKPENIPQPISNTSRANLNKLLTDYTEMKKAILHVYWEEFQKDPVGLMSRVAQPASKKIDQNKLKPEMDEKGNLTTAGFACSQCGQPLFVYKLEQVSEKGKAYTNYFGRCNVAEHEKLILLAQLKPEKDSDEAVTYSLGKFGQRALDFYSIHVTKESTHPVKPLAQIAGNRYASGPVGKALSDACMGTIASFLSKYQDIIIEHQKVVKGNQKRLESLRELAGKENLEYPSVTLPPQPHTKEGVDAYNEVIARVRMWVNLNLWQKLKLSRDDAKPLLRLKGFPSFPLVERQANEVDWWDMVCNVKKLINEKKEDGKVFWQNLAGYKRQEALRPYLSSEEDRKKGKKFARYQLGDLLLHLEKKHGEDWGKVYDEAWERIDKKVEGLSKHIKLEEERRSEDAQSKAALTDWLRAKASFVIEGLKEADKDEFCRCELKLQKWYGDLRGKPFAIEAENSILDISGFSKQYNCAFIWQKDGVKKLNLYLIINYFKGGKLRFKKIKPEAFEANRFYTVINKKSGEIVPMEVNFNFDDPNLIILPLAFGKRQGREFIWNDLLSLETGSLKLANGRVIEKTLYNRRTRQDEPALFVALTFERREVLDSSNIKPMNLIGVDRGENIPAVIALTDPEGCPLSRFKDSLGNPTHILRIGESYKEKQRTIQAKKEVEQRRAGGYSRKYASKAKNLADDMVRNTARDLLYYAVTQDAMLIFENLSRGFGRQGKRTFMAERQYTRMEDWLTAKLAYEGLPSKTYLSKQLAQYTSKTCSNCGFTITSADYDRVLEKLKKTATGWMTTINGKELKVEGQITYYNRYKRQNVVKDLSVELDRLSEESVNNDISSWTKGRSGEALSLLKKRFSHRPVQEKFVCLNCGFETHADEQAALNIARSWLFLRSQEYKKYQTNKTTGNTDKRAFVETWQSFYRKKLKEVWKPAV

SEQ ID NO: 845 - protein, 978 aa, Artificial Sequence
  CasX Variant
QEIKRINKIRRRLVKDSNTKKAGKTGPMKTLLVRVMTPDLRERLENLRKKPENIPQPISNTSRANLNKLLTDYTEMKKAILHVYWEEFQKDPVGLMSRVAQPASKKIDQNKLKPEMDEKGNLTTAGFACSQCGQPLFVYKLEQVSEKGKAYTNYFGRCNVAEHEKLILLAQLKPEKDSDEAVTYSLGKFGQRALDFYSIHVTKESTHPVKPLAQIAGNRYASGPVGKALSDACMGTIASFLSKYQDIIIEHQKVVKGNQKRLESLRELAGKENLEYPSVTLPPQPHTKEGVDAYNEVIARVRMWVNLNLWQKLKLSRDDAKPLLRLKGFPSFPLVERQANEVDWWDMVCNVKKLINEKKEDGKVFWQNLAGYKRQEALRPYLSSEEDRKKGKKFARYQLGDLLLHLEKKHGEDWGKVYDEAWERIDKKVEGLSKHIKLEEERRSEDAQSKAALTDWLRAKASFVIEGLKEADKDEFCRCELKLQKWYGDLRGKPFAIEAENSILDISGFSKQYNCAFIWQKDGVKKLNLYLIINYFKGGKLRFKKIKPEAFEANRFYTVINKKSGEIVPMEVNFNFDDPNLIILPLAFGKRQGREFIWNDLLSLETGSLKLANGRVIEKTLYNRRTRQDEPALFVALTFERREVLDSSNIKPMNLIGVDRGENIPAVIALTDPEGCPLSRFKDSLGNPTHILRIGESYKEKQRTIQAKKEVEQRRAGGYSRKYASKAKNLADDMVRNTARDLLYYAVTQDAMLIFENLSRGFGRQGKRTFMAERQYTRMEDWLTAKLAYEGLPSKTYLSKTLAQYYSKTCSNCGFTITSADYDRVLEKLKKTATGWMTTINGKELKVEGQITYYNRYKRQNVVKDLSVELDRLSEESVNNDISSWTKGRSGEALSLLKKRFSHRPVQEKFVCLNCGFETHADEQAALNIARSWLFLRSQEYKKYQTNKTTGNTDKRAFVETWQSFYRKKLKEVWKPAV

SEQ ID NO: 846 - protein, 978 aa, Artificial Sequence
  CasX Variant
QEIKRINKIRRRLVKDSNTKKAGKTGPMKTLLVRVMTPDLRERLENLRKKPENIPQPISNTSRANLNKLLTDYTEMKKAILHVYWEEFQKDPVGLMSRVAQPASKKIDQNKLKPEMDEKGNLTTAGFACSQCGQPLFVYKLEQVSEKGKAYTNYFGRCNVAEHEKLILLAQLKPEKDSDEAVTYSLGKFGQRALDFYSIHVTKESTHPVKPLAQIAGNRYASGPVGKALSDACMGTIASFLSKYQDIIIEHQKVVKGNQKRLESLRELAGKENLEYPSVTLPPQPHTKEGVDAYNEVIARVRMWVNLNLWQKLKLSRDDAKPLLRLKGFPSFPLVERQANEVDWWDMVCNVKKLINEKKEDGKVFWQNLAGYKRQEALRPYLSSEEDRKKGKKFARYQLGDLLLHLEKKHGEDWGKVYDEAWERIDKKVEGLSKHIKLEEERRSEDAQSKAALTDWLRAKASFVIEGLKEADKDEFCRCELKLQKWYGDLRGKPFAIEAENSILDISGFSKQYNCAFIWQKDGVKKLNLYLIINYFKGGKLRFKKIKPEAFEANRFYTVINKKSGEIVPMEVNFNFDDPNLIILPLAFGKRQGREFIWNDLLSLETGSLKLANGRVIEKTLYNRRTRQDEPALFVALTFERREVLDSSNIKPMNLIGVDRGENIPAVIALTDPEGCPLSRFKDSLGNPTHILRIGESYKEKQRTIQAKKEVEQRRAGGYSRKYASKAKNLADDMVRNTARDLLYYAVTQDAMLIFENLSRGFGRQGKRTFMAERQYTRMEDWLTAKLAYEGLPSKTYLSKTLAKYTSKTCSNCGFTITSADYDRVLEKLKKTATGWMTTINGKELKVEGQITYYNRYKRQNVVKDLSVELDRLSEESVNNDISSWTKGRSGEALSLLKKRFSHRPVQEKFVCLNCGFETHADEQAALNIARSWLFLRSQEYKKYQTNKTTGNTDKRAFVETWQSFYRKKLKEVWKPAV

SEQ ID NO: 847 - protein, 978 aa, Artificial Sequence
  CasX Variant
QEIKRINKIRRRLVKDSNTKKAGKTGPMKTLLVRVMTPDLRERLENLRKKPENIPQPISNTSRANLNKLLTDYTEMKKAILHVYWEEFQKDPVGLMSRVAQPASKKIDQNKLKPEMDEKGNLTTAGFACSQCGQPLFVYKLEQVSEKGKAYTNYFGRCNVAEHEKLILLAQLKPEKDSDEAVTYSLGKFGQRALDFYSIHVTKESTHPVKPLAQIAGNRYASGPVGKALSDACMGTIASFLSKYQDIIIEHQKVVKGNQKRLESLRELAGKENLEYPSVTLPPQPHTKEGVDAYNEVIARVRMWVNLNLWQKLKLSRDDAKPLLRLKGFPSFPLVERQANEVDWWDMVCNVKKLINEKKEDGKVFWQNLAGYKRQEALRPYLSSEEDRKKGKKFARYQLGDLLLHLEKKHGEDWGKVYDEAWERIDKKVEGLSKHIKLEEERRSEDAQSKAALTDWLRAKASFVIEGLKEADKDEFCRCELKLQKWYGDLRGKPFAIEAENSILDISGFSKQYNCAFIWQKDGVKKLNLYLIINYFKGGKLRFKKIKPEAFEANRFYTVINKKSGEIVPMEVNFNFDDPNLIILPLAFGKRQGREFIWNDLLSLETGSLKLANGRVIEKTLYNRRTRQDEPALFVALTFERREVLDSSNIKPMNLIGVDRGENIPAVIALTDPEGCPLSRFKDSLGNPTHILRIGESYKEKQRTIQAKKEVEQRRAGGYSRKYASKAKNLADDMVRNTARDLLYYAVTQDAMLIFENLSRGFGRQGKRTFMAERQYTRMEDWLTAKLAYEGLASKTYLSKTLAQYTSKTCSNCGFTITSADYDRVLEKLKKTATGWMTTINGKELKVEGQITYYNRYKRQNVVKDLSVELDRLSEESVNNDISSWTKGRSGEALSLLKKRFSHRPVQEKFVCLNCGFETHADEQAALNIARSWLFLRSQEYKKYQTNKTTGNTDKRAFVETWQSFYRKKLKEVWKPAV

SEQ ID NO: 848 - protein, 979 aa, Artificial Sequence
  CasX Variant
QEIKRINKIRRRLVKDSNTKKAGKTGPMKTLLVRVMTPDLRERLENLRKKPENIPQPISNTSRANLNKLLTDYTEMKKAILHVYWEEFQKDPVGLMSRVAQPASKKIDQNKLKPEMDEKGNLTTAGFACSQCGQPLFVYKLEQVSEKGKAYTNYFGRCNVAEHEKLILLAQLKPEKDSDEAVTYSLGKFGQRALDFYSIHVTKESTHPVKPLAQIAGNRYASGPVGKALSDACMGTIASFLSKYQDIIIEHQKVVKGNQKRLESLRELAGKENLEYPSVTLPPQPHTKEGVDAYNEVIARVRMWVNLNLWQKLKLSRDDAKPLLRLKGFPSFPLVERQANEVDWWDMVCNVKKLINEKKEDGKVFWQNLAGYKRQEALRPYLSSEEDRKKGKKFARYQLGDLLLHLEKKHGEDWGKVYDEAWERIDKKVEGLSKHIKLEEERRSEDAQSKAALTDWLRAKASFVIEGLKEADKDEFCRCELKLQKWYGDLRGKPFAIEAENSILDISGFSKQYNCAFIWQKDGVKKLNLYLIINYFKGGKLRFKKIKPEAFEANRFYTVINKKSGEIVPMEVNFNFDDPNLIILPLAFGKRQGREFIWNDLLSLETGSLKLANGRVIEKTLYNRRTRQDEPALFVALTFERREVLDSSNIKPMNLIGVDRGENIPAVIALTDPEGCPLSRFKDSLGNPTHILRIGESYKEKQRTIQAKKEVEQRRAGGYSRKYASKAKNLADDMVRNTARDLLYYAVTQDAMLIFENLSRGFGRQGKRTFMAERQYTRMEDWLTAKLAYEGLPSKTYLSKTLLAQYTSKTCSNCGFTITSADYDRVLEKLKKTATGWMTTINGKELKVEGQITYYNRYKRQNVVKDLSVELDRLSEESVNNDISSWTKGRSGEALSLLKKRFSHRPVQEKFVCLNCGFETHADEQAALNIARSWLFLRSQEYKKYQTNKTTGNTDKRAFVETWQSFYRKKLKEVWKPAV

SEQ ID NO: 849 - protein, 977 aa, Artificial Sequence
  CasX Variant
QEIKRINKIRRRLVKDSNTKKAGKTGPMKTLLVRVMTPDLRERLENLRKKPENIPQPISNTSRANLNKLLTDYTEMKKAILHVYWEEFQKDPVGLMSRVAQPASKKIDQNKLKPEMDEKGNLTTAGFACSQCGQPLFVYKLEQVSEKGKAYTNYFGRCNVAEHEKLILLAQLKPEKDSDEAVTYSLGKFGQRALDFYSIHVTKESTHPVKPLAQIAGNRYASGPVGKALSDACMGTIASFLSKYQDIIIEHQKVVKGNQKRLESLRELAGKENLEYPSVTLPPQPHTKEGVDAYNEVIARVRMWVNLNLWQKLKLSRDDAKPLLRLKGFPSFPLVERQANEVDWWDMVCNVKKLINEKKEDGKVFWQNLAGYKRQEALRPYLSSEEDRKKGKKFARYQLGDLLLHLEKKHGEDWGKVYDEAWERIDKKVEGLSKHIKLEEERRSEDAQSKAALTDWLRAKASFVIEGLKEADKDEFCRCELKLQKWYGDLRGKPFAIEAENSILDISGFSKQYNCAFIWQKDGVKKLNLYLIINYFKGGKLRFKKIKPEAFEANRFYTVINKKSGEIVPMEVNFNFDDPNLIILPLAFGKRQGREFIWNDLLSLETGSLKLANGRVIEKTLYNRRTRQDEPALFVALTFERREVLDSSNIKPMNLIGVDRGENIPAVIALTDPEGCPLSRFKDSLGNPTHILRIGESYKEKQRTIQAKKEVEQRRAGGYSRKYASKAKNLADDMVRNTARDLLYYAVTQDAMLIFENLSRGFGRQGKRTFMAERQYTRMEDWLTAKLAYEGLPSKTYLSKTAQYTSKTCSNCGFTITSADYDRVLEKLKKTATGWMTTINGKELKVEGQITYYNRYKRQNVVKDLSVELDRLSEESVNNDISSWTKGRSGEALSLLKKRFSHRPVQEKFVCLNCGFETHADEQAALNIARSWLFLRSQEYKKYQTNKTTGNTDKRAFVETWQSFYRKKLKEVWKPAV

SEQ ID NO: 850 - protein, 979 aa, Artificial Sequence
  CasX Variant
QEIKRINKIRRRLVKDSNTKKAGKTGPMKTLLVRVMTPDLRERLENLRKKPENIPQPISNTSRANLNKLLTDYTEMKKAILHVYWEEFQKDPVGLMSRVAQPASKKIDQNKLKPEMDEKGNLTTAGFACSQCGQPLFVYKLEQVSEKGKAYTNYFGRCNVAEHEKLILLAQLKPEKDSDEAVTYSLGKFGQRALDFYSIHVTKESTHPVKPLAQIAGNRYASGPVGKALSDACMGTIASFLSKYQDIIIEHQKVVKGNQKRLESLRELAGKENLEYPSVTLPPQPHTKEGVDAYNEVIARVRMWVNLNLWQKLKLSRDDAKPLLRLKGFPSFPLVERQANEVDWWDMVCNVKKLINEKKEDGKVFWQNLAGYKRQEALRPYLSSEEDRKKGKKFARYQLGDLLLHLEKKHGEDWGKVYDEAWERIDKKVEGLSKHIKLEEERRSEDAQSKAALTDWLRAKASFVIEGLKEADKDEFCRCELKLQKWYGDLRGKPFAIEAENSILDISGFSKQYNCAFIWQKDGVKKLNLYLIINYFKGGKLRFKKIKPEAFEANRFYTVINKKSGEIVPMEVNFNFDDPNLIILPLAFGKRQGREFIWNDLLSLETGSLKLANGRVIEKTLYNRRTRQDEPALFVALTFERREVLDSSNIKPMNLIGVDRGENIPAVIALTDPEGCPLSRFKDSLGNPTHILRIGESYKEKQRTIQAKKEVEQRRAGGYSRKYASKAKNLADDMVRNTARDLLYYAVTQDAMLIFENLSRGFGRQGKRTFMAERQYTRMEDWLTAKLAYEGLPSKTYLSKTLAQYTSKTCSNCGFTWITSADYDRVLEKLKKTATGWMTTINGKELKVEGQITYYNRYKRQNVVKDLSVELDRLSEESVNNDISSWTKGRSGEALSLLKKRFSHRPVQEKFVCLNCGFETHADEQAALNIARSWLFLRSQEYKKYQTNKTTGNTDKRAFVETWQSFYRKKLKEVWKPAV

SEQ ID NO: 851 - protein, 979 aa, Artificial Sequence
  CasX Variant
QEIKRINKIRRRLVKDSNTKKAGKTGPMKTLLVRVMTPDLRERLENLRKKPENIPQPISNTSRANLNKLLTDYTEMKKAILHVYWEEFQKDPVGLMSRVAQPASKKIDQNKLKPEMDEKGNLTTAGFACSQCGQPLFVYKLEQVSEKGKAYTNYFGRCNVAEHEKLILLAQLKPEKDSDEAVTYSLGKFGQRALDFYSIHVTKESTHPVKPLAQIAGNRYASGPVGKALSDACMGTIASFLSKYQDIIIEHQKVVKGNQKRLESLRELAGKENLEYPSVTLPPQPHTKEGVDAYNEVIARVRMWVNLNLWQKLKLSRDDAKPLLRLKGFPSFPLVERQANEVDWWDMVCNVKKLINEKKEDGKVFWQNLAGYKRQEALRPYLSSEEDRKKGKKFARYQLGDLLLHLEKKHGEDWGKVYDEAWERIDKKVEGLSKHIKLEEERRSEDAQSKAALTDWLRAKASFVIEGLKEADKDEFCRCELKLQKWYGDLRGKPFAIEAENSILDISGFSKQYNCAFIWQKDGVKKLNLYLIINYFKGGKLRFKKIKPEAFEANRFYTVINKKSGEIVPMEVNFNFDDPNLIILPLAFGKRQGREFIWNDLLSLETGSLKLANGRVIEKTLYNRRTRQDEPALFVALTFERREVLDSSNIKPMNLIGVDRGENIPAVIALTDPEGCPLSRFKDSLGNPTHILRIGESYKEKQRTIQAKKEVEQRRAGGYSRKYASKAKNLADDMVRNTARDLLYYAVTQDAMLIFENLSRGFGRQGKRTFMAERQYTRMEDWLTAKLAYEGLPSKTYLSKHTLAQYTSKTCSNCGFTITSADYDRVLEKLKKTATGWMTTINGKELKVEGQITYYNRYKRQNVVKDLSVELDRLSEESVNNDISSWTKGRSGEALSLLKKRFSHRPVQEKFVCLNCGFETHADEQAALNIARSWLFLRSQEYKKYQTNKTTGNTDKRAFVETWQSFYRKKLKEVWKPAV

SEQ ID NO: 852 - protein, 978 aa, Artificial Sequence
  CasX Variant
QEIKRINKIRRRLVKDSNTKKAGKTGPMKTLLVRVMTPDLRERLENLRKKPENIPQPISNTSRANLNKLLTDYTEMKKAILHVYWEEFQKDPVGLMSRVAQPASKKIDQNKLKPEMDEKGNLTTAGFACSQCGQPLFVYKLEQVSEKGKAYTNYFGRCNVAEHEKLILLAQLKPEKDSDEAVTYSLGKFGQRALDFYSIHVTKESTHPVKPLAQIAGNRYASGPVGKALSDACMGTIASFLSKYQDIIIEHQKVVKGNQKRLESLRELAGKENLEYPSVTLPPQPHTKEGVDAYNEVIARVRMWVNLNLWQKLKLSRDDAKPLLRLKGFPSFPLVERQANEVDWWDMVCNVKKLINEKKEDGKVFWQNLAGYKRQEALRPYLSSEEDRKKGKKFARYQLGDLLLHLEKKHGEDWGKVYDEAWERIDKKVEGLSKHIKLEEERRSEDAQSKAALTDWLRAKASFVIEGLKEADKDEFCRCELKLQKWYGDLRGKPFAIEAENSILDISGFSKQYNCAFIWQKDGVKKLNLYLIINYFKGGKLRFKKIKPEAFEANRFYTVINKKSGEIVPMEVNFNFDDPNLIILPLAFGKRQGREFIWNDLLSLETGSLKLANGRVIEKTLYNRRTRQDEPALFVALTFERREVLDSSNIKPMNLIGVDRGENIPAVIALTDPEGCPLSRFKDSLGNPTHILRIGESYKEKQRTIQAKKEVEQRRAGGYSRKYASKAKNLADDMVRNTARDLLYYAVTQDAMLIFENLSRGFGRQGKRTFMAERQYTRMEDWLTAKLAYEGLPSKTYLSKTLAQYTSKPCSNCGFTITSADYDRVLEKLKKTATGWMTTINGKELKVEGQITYYNRYKRQNVVKDLSVELDRLSEESVNNDISSWTKGRSGEALSLLKKRFSHRPVQEKFVCLNCGFETHADEQAALNIARSWLFLRSQEYKKYQTNKTTGNTDKRAFVETWQSFYRKKLKEVWKPAV

SEQ ID NO: 853 - protein, 979 aa, Artificial Sequence
  CasX Variant
QEIKRINKIRRRLVKDSNTKKAGKTGPMKTLLVRVMTPDLRERLENLRKKPENIPQPISNTSRANLNKLLTDYTEMKKAILHVYWEEFQKDPVGLMSRVAQPASKKIDQNKLKPEMDEKGNLTTAGFACSQCGQPLFVYKLEQVSEKGKAYTNYFGRCNVAEHEKLILLAQLKPEKDSDEAVTYSLGKFGQRALDFYSIHVTKESTHPVKPLAQIAGNRYASGPVGKALSDACMGTIASFLSKYQDIIIEHQKVVKGNQKRLESLRELAGKENLEYPSVTLPPQPHTKEGVDAYNEVIARVRMWVNLNLWQKLKLSRDDAKPLLRLKGFPSFPLVERQANEVDWWDMVCNVKKLINEKKEDGKVFWQNLAGYKRQEALRPYLSSEEDRKKGKKFARYQLGDLLLHLEKKHGEDWGKVYDEAWERIDKKVEGLSKHIKLEEERRSEDAQSKAALTDWLRAKASFVIEGLKEADKDEFCRCELKLQKWYGDLRGKPFAIEAENSILDISGFSKQYNCAFIWQKDGVKKLNLYLIINYFKGGKLRFKKIKPEAFEANRFYTVINKKSGEIVPMEVNFNFDDPNLIILPLAFGKRQGREFIWNDLLSLETGSLKLANGRVIEKTLYNRRTRQDEPALFVALTFERREVLDSSNIKPMNLIGVDRGENIPAVIALTDPEGCPLSRFKDSLGNPTHILRIGESYKEKQRTIQAKKEVEQRRAGGYSRKYASKAKNLADDMVRNTARDLLYYAVTQDAMLIFENLSRGFGRQGKRTFMAERQYTRMEDWLTAKLAYEGLPSKTYLSKTLAAQYTSKTCSNCGFTITSADYDRVLEKLKKTATGWMTTINGKELKVEGQITYYNRYKRQNVVKDLSVELDRLSEESVNNDISSWTKGRSGEALSLLKKRFSHRPVQEKFVCLNCGFETHADEQAALNIARSWLFLRSQEYKKYQTNKTTGNTDKRAFVETWQSFYRKKLKEVWKPAV

SEQ ID NO: 854 - protein, 979 aa, Artificial Sequence
  CasX Variant
QEIKRINKIRRRLVKDSNTKKAGKTGPMKTLLVRVMTPDLRERLENLRKKPENIPQPISNTSRANLNKLLTDYTEMKKAILHVYWEEFQKDPVGLMSRVAQPASKKIDQNKLKPEMDEKGNLTTAGFACSQCGQPLFVYKLEQVSEKGKAYTNYFGRCNVAEHEKLILLAQLKPEKDSDEAVTYSLGKFGQRALDFYSIHVTKESTHPVKPLAQIAGNRYASGPVGKALSDACMGTIASFLSKYQDIIIEHQKVVKGNQKRLESLRELAGKENLEYPSVTLPPQPHTKEGVDAYNEVIARVRMWVNLNLWQKLKLSRDDAKPLLRLKGFPSFPLVERQANEVDWWDMVCNVKKLINEKKEDGKVFWQNLAGYKRQEALRPYLSSEEDRKKGKKFARYQLGDLLLHLEKKHGEDWGKVYDEAWERIDKKVEGLSKHIKLEEERRSEDAQSKAALTDWLRAKASFVIEGLKEADKDEFCRCELKLQKWYGDLRGKPFAIEAENSILDISGFSKQYNCAFIWQKDGVKKLNLYLIINYFKGGKLRFKKIKPEAFEANRFYTVINKKSGEIVPMEVNFNFDDPNLIILPLAFGKRQGREFIWNDLLSLETGSLKLANGRVIEKTLYNRRTRQDEPALFVALTFERREVLDSSNIKPMNLIGVDRGENIPAVIALTDPEGCPLSRFKDSLGNPTHILRIGESYKEKQRTIQAKKEVEQRRAGGYSRKYASKAKNLADDMVRNTARDLLYYAVTQDAMLIFENLSRGFGRQGKRTFMAERQYTRMEDWLTAKLAYEGLPSKTYLSKTLAQYTSKTCSNCGGFTITSADYDRVLEKLKKTATGWMTTINGKELKVEGQITYYNRYKRQNVVKDLSVELDRLSEESVNNDISSWTKGRSGEALSLLKKRFSHRPVQEKFVCLNCGFETHADEQAALNIARSWLFLRSQEYKKYQTNKTTGNTDKRAFVETWQSFYRKKLKEVWKPAV

SEQ ID NO: 855 - protein, 979 aa, Artificial Sequence
  CasX Variant
QEIKRINKIRRRLVKDSNTKKAGKTGPMKTLLVRVMTPDLRERLENLRKKPENIPQPISNTSRANLNKLLTDYTEMKKAILHVYWEEFQKDPVGLMSRVAQPASKKIDQNKLKPEMDEKGNLTTAGFACSQCGQPLFVYKLEQVSEKGKAYTNYFGRCNVAEHEKLILLAQLKPEKDSDEAVTYSLGKFGQRALDFYSIHVTKESTHPVKPLAQIAGNRYASGPVGKALSDACMGTIASFLSKYQDIIIEHQKVVKGNQKRLESLRELAGKENLEYPSVTLPPQPHTKEGVDAYNEVIARVRMWVNLNLWQKLKLSRDDAKPLLRLKGFPSFPLVERQANEVDWWDMVCNVKKLINEKKEDGKVFWQNLAGYKRQEALRPYLSSEEDRKKGKKFARYQLGDLLLHLEKKHGEDWGKVYDEAWERIDKKVEGLSKHIKLEEERRSEDAQSKAALTDWLRAKASFVIEGLKEADKDEFCRCELKLQKWYGDLRGKPFAIEAENSILDISGFSKQYNCAFIWQKDGVKKLNLYLIINYFKGGKLRFKKIKPEAFEANRFYTVINKKSGEIVPMEVNFNFDDPNLIILPLAFGKRQGREFIWNDLLSLETGSLKLANGRVIEKTLYNRRTRQDEPALFVALTFERREVLDSSNIKPMNLIGVDRGENIPAVIALTDPEGCPLSRFKDSLGNPTHILRIGESYKEKQRTIQAKKEVEQRRAGGYSRKYASKAKNLADDMVRNTARDLLYYAVTQDAMLIFENLSRGFGRQGKRTFMAERQYTRMEDWLTAKLAYEGLPSKTYLSKTLFAQYTSKTCSNCGFTITSADYDRVLEKLKKTATGWMTTINGKELKVEGQITYYNRYKRQNVVKDLSVELDRLSEESVNNDISSWTKGRSGEALSLLKKRFSHRPVQEKFVCLNCGFETHADEQAALNIARSWLFLRSQEYKKYQTNKTTGNTDKRAFVETWQSFYRKKLKEVWKPAV

SEQ ID NO: 856 - protein, 979 aa, Artificial Sequence
  CasX Variant
QEIKRINKIRRRLVKDSNTKKAGKTGPMKTLLVRVMTPDLRERLENLRKKPENIPQPISNTSRANLNKLLTDYTEMKKAILHVYWEEFQKDPVGLMSRVAQPASKKIDQNKLKPEMDEKGNLTTAGFACSQCGQPLFVYKLEQVSEKGKAYTNYFGRCNVAEHEKLILLAQLKPEKDSDEAVTYSLGKFGQRALDFYSIHVTKESTHPVKPLAQIAGNRYASGPVGKALSDACMGTIASFLSKYQDIIIEHQKVVKGNQKRLESLRELAGKENLEYPSVTLPPQPHTKEGVDAYNEVIARVRMWVNLNLWQKLKLSRDDAKPLLRLKGFPSFPLVERQANEVDWWDMVCNVKKLINEKKEDGKVFWQNLAGYKRQEALRPYLSSEEDRKKGKKFARYQLGDLLLHLEKKHGEDWGKVYDEAWERIDKKVEGLSKHIKLEEERRSEDAQSKAALTDWLRAKASFVIEGLKEADKDEFCRCELKLQKWYGDLRGKPFAIEAENSILDISGFSKQYNCAFIWQKDGVKKLNLYLIINYFKGGKLRFKKIKPEAFEANRFYTVINKKSGEIVPMEVNFNFDDPNLIILPLAFGKRQGREFIWNDLLSLETGSLKLANGRVIEKTLYNRRTRQDEPALFVALTFERREVLDSSNIKPMNLIGVDRGENIPAVIALTDPEGCPLSRFKDSLGNPTHILRIGESYKEKQRTIQAKKEVEQRRAGGYSRKYASKAKNLADDMVRNTARDLLYYAVTQDAMLIFENLSRGFGRQGKRTFMAERQYTRMEDWLTAKLAYEGLPSKTYLSKTLAQYTSKNTCSNCGFTITSADYDRVLEKLKKTATGWMTTINGKELKVEGQITYYNRYKRQNVVKDLSVELDRLSEESVNNDISSWTKGRSGEALSLLKKRFSHRPVQEKFVCLNCGFETHADEQAALNIARSWLFLRSQEYKKYQTNKTTGNTDKRAFVETWQSFYRKKLKEVWKPAV

SEQ ID NO: 857 - protein, 978 aa, Artificial Sequence
  CasX Variant
QEIKRINKIRRRLVKDSNTKKAGKTGPMKTLLVRVMTPDLRERLENLRKKPENIPQPISNTSRANLNKLLTDYTEMKKAILHVYWEEFQKDPVGLMSRVAQPASKKIDQNKLKPEMDEKGNLTTAGFACSQCGQPLFVYKLEQVSEKGKAYTNYFGRCNVAEHEKLILLAQLKPEKDSDEAVTYSLGKFGQRALDFYSIHVTKESTHPVKPLAQIAGNRYASGPVGKALSDACMGTIASFLSKYQDIIIEHQKVVKGNQKRLESLRELAGKENLEYPSVTLPPQPHTKEGVDAYNEVIARVRMWVNLNLWQKLKLSRDDAKPLLRLKGFPSFPLVERQANEVDWWDMVCNVKKLINEKKEDGKVFWQNLAGYKRQEALRPYLSSEEDRKKGKKFARYQLGDLLLHLEKKHGEDWGKVYDEAWERIDKKVEGLSKHIKLEEERRSEDAQSKAALTDWLRAKASFVIEGLKEADKDEFCRCELKLQKWYGDLRGKPFAIEAENSILDISGFSKQYNCAFIWQKDGVKKLNLYLIINYFKGGKLRFKKIKPEAFEANRFYTVINKKSGEIVPMEVNFNFDDPNLIILPLAFGKRQGREFIWNDLLSLETGSLKLANGRVIEKTLYNRRTRQDEPALFVALTFERREVLDSSNIKPMNLIGVDRGENIPAVIALTDPEGCPLSRFKDSLGNPTHILRIGESYKEKQRTIQAKKEVEQRRAGGYSRKYASKAKNLADDMVRNTARDLLYYAVTQDAMLIFENLSRGFGRQGKRTFMAERQYTRMEDWLTAKLAYEGLPSKTYLSKTLAQYTSKTCSNCGPTITSADYDRVLEKLKKTATGWMTTINGKELKVEGQITYYNRYKRQNVVKDLSVELDRLSEESVNNDISSWTKGRSGEALSLLKKRFSHRPVQEKFVCLNCGFETHADEQAALNIARSWLFLRSQEYKKYQTNKTTGNTDKRAFVETWQSFYRKKLKEVWKPAV

SEQ ID NO: 858 - protein, 979 aa, Artificial Sequence
  CasX Variant
QEIKRINKIRRRLVKDSNTKKAGKTGPMKTLLVRVMTPDLRERLENLRKKPENIPQPISNTSRANLNKLLTDYTEMKKAILHVYWEEFQKDPVGLMSRVAQPASKKIDQNKLKPEMDEKGNLTTAGFACSQCGQPLFVYKLEQVSEKGKAYTNYFGRCNVAEHEKLILLAQLKPEKDSDEAVTYSLGKFGQRALDFYSIHVTKESTHPVKPLAQIAGNRYASGPVGKALSDACMGTIASFLSKYQDIIIEHQKVVKGNQKRLESLRELAGKENLEYPSVTLPPQPHTKEGVDAYNEVIARVRMWVNLNLWQKLKLSRDDAKPLLRLKGFPSFPLVERQANEVDWWDMVCNVKKLINEKKEDGKVFWQNLAGYKRQEALRPYLSSEEDRKKGKKFARYQLGDLLLHLEKKHGEDWGKVYDEAWERIDKKVEGLSKHIKLEEERRSEDAQSKAALTDWLRAKASFVIEGLKEADKDEFCRCELKLQKWYGDLRGKPFAIEAENSILDISGFSKQYNCAFIWQKDGVKKLNLYLIINYFKGGKLRFKKIKPEAFEANRFYTVINKKSGEIVPMEVNFNFDDPNLIILPLAFGKRQGREFIWNDLLSLETGSLKLANGRVIEKTLYNRRTRQDEPALFVALTFERREVLDSSNIKPMNLIGVDRGENIPAVIALTDPEGCPLSRFKDSLGNPTHILRIGESYKEKQRTIQAKKEVEQRRAGGYSRKYASKAKNLADDMVRNTARDLLYYAVTQDAMLIFENLSRGFGRQGKRTFMAERQYTRMEDWLTAKLAYEGLPSKTYLSKTWLAQYTSKTCSNCGFTITSADYDRVLEKLKKTATGWMTTINGKELKVEGQITYYNRYKRQNVVKDLSVELDRLSEESVNNDISSWTKGRSGEALSLLKKRFSHRPVQEKFVCLNCGFETHADEQAALNIARSWLFLRSQEYKKYQTNKTTGNTDKRAFVETWQSFYRKKLKEVWKPAV

SEQ ID NO: 859 - protein, 978 aa, Artificial Sequence
  CasX Variant
QEIKRINKIRRRLVKDSNTKKAGKTGPMKTLLVRVMTPDLRERLENLRKKPENIPQPISNTSRANLNKLLTDYTEMKKAILHVYWEEFQKDPVGLMSRVAQPASKKIDQNKLKPEMDEKGNLTTAGFACSQCGQPLFVYKLEQVSEKGKAYTNYFGRCNVAEHEKLILLAQLKPEKDSDEAVTYSLGKFGQRALDFYSIHVTKESTHPVKPLAQIAGNRYASGPVGKALSDACMGTIASFLSKYQDIIIEHQKVVKGNQKRLESLRELAGKENLEYPSVTLPPQPHTKEGVDAYNEVIARVRMWVNLNLWQKLKLSRDDAKPLLRLKGFPSFPLVERQANEVDWWDMVCNVKKLINEKKEDGKVFWQNLAGYKRQEALRPYLSSEEDRKKGKKFARYQLGDLLLHLEKKHGEDWGKVYDEAWERIDKKVEGLSKHIKLEEERRSEDAQSKAALTDWLRAKASFVIEGLKEADKDEFCRCELKLQKWYGDLRGKPFAIEAENSILDISGFSKQYNCAFIWQKDGVKKLNLYLIINYFKGGKLRFKKIKPEAFEANRFYTVINKKSGEIVPMEVNFNFDDPNLIILPLAFGKRQGREFIWNDLLSLETGSLKLANGRVIEKTLYNRRTRQDEPALFVALTFERREVLDSSNIKPMNLIGVDRGENIPAVIALTDPEGCPLSRFKDSLGNPTHILRIGESYKEKQRTIQAKKEVEQRRAGGYSRKYASKAKNLADDMVRNTARDLLYYAVTQDAMLIFENLSRGFGRQGKRTFMAERQYTRMEDWLTAKLAYEGLPSKTYLSKTLAQYTSKTMSNCGFTITSADYDRVLEKLKKTATGWMTTINGKELKVEGQITYYNRYKRQNVVKDLSVELDRLSEESVNNDISSWTKGRSGEALSLLKKRFSHRPVQEKFVCLNCGFETHADEQAALNIARSWLFLRSQEYKKYQTNKTTGNTDKRAFVETWQSFYRKKLKEVWKPAV

SEQ ID NO: 860 - protein, 977 aa, Artificial Sequence
  CasX Variant
QEIKRINKIRRRLVKDSNTKKAGKTGPMKTLLVRVMTPDLRERLENLRKKPENIPQPISNTSRANLNKLLTDYTEMKKAILHVYWEEFQKDPVGLMSRVAQPASKKIDQNKLKPEMDEKGNLTTAGFACSQCGQPLFVYKLEQVSEKGKAYTNYFGRCNVAEHEKLILLAQLKPEKDSDEAVTYSLGKFGQRALDFYSIHVTKESTHPVKPLAQIAGNRYASGPVGKALSDACMGTIASFLSKYQDIIIEHQKVVKGNQKRLESLRELAGKENLEYPSVTLPPQPHTKEGVDAYNEVIARVRMWVNLNLWQKLKLSRDDAKPLLRLKGFPSFPLVERQANEVDWWDMVCNVKKLINEKKEDGKVFWQNLAGYKRQEALRPYLSSEEDRKKGKKFARYQLGDLLLHLEKKHGEDWGKVYDEAWERIDKKVEGLSKHIKLEEERRSEDAQSKAALTDWLRAKASFVIEGLKEADKDEFCRCELKLQKWYGDLRGKPFAIEAENSILDISGFSKQYNCAFIWQKDGVKKLNLYLIINYFKGGKLRFKKIKPEAFEANRFYTVINKKSGEIVPMEVNFNFDDPNLIILPLAFGKRQGREFIWNDLLSLETGSLKLANGRVIEKTLYNRRTRQDEPALFVALTFERREVLDSSNIKPMNLIGVDRGENIPAVIALTDPEGCPLSRFKDSLGNPTHILRIGESYKEKQRTIQAKKEVEQRRAGGYSRKYASKAKNLADDMVRNTARDLLYYAVTQDAMLIFENLSRGFGRQGKRTFMAERQYTRMEDWLTAKLAYEGLPSKTYLSKTLAQYTSKTCSCGFTITSADYDRVLEKLKKTATGWMTTINGKELKVEGQITYYNRYKRQNVVKDLSVELDRLSEESVNNDISSWTKGRSGEALSLLKKRFSHRPVQEKFVCLNCGFETHADEQAALNIARSWLFLRSQEYKKYQTNKTTGNTDKRAFVETWQSFYRKKLKEVWKPAV

SEQ ID NO: 861 - protein, 979 aa, Artificial Sequence
  CasX Variant
QEIKRINKIRRRLVKDSNTKKAGKTGPMKTLLVRVMTPDLRERLENLRKKPENIPQPISNTSRANLNKLLTDYTEMKKAILHVYWEEFQKDPVGLMSRVAQPASKKIDQNKLKPEMDEKGNLTTAGFACSQCGQPLFVYKLEQVSEKGKAYTNYFGRCNVAEHEKLILLAQLKPEKDSDEAVTYSLGKFGQRALDFYSIHVTKESTHPVKPLAQIAGNRYASGPVGKALSDACMGTIASFLSKYQDIIIEHQKVVKGNQKRLESLRELAGKENLEYPSVTLPPQPHTKEGVDAYNEVIARVRMWVNLNLWQKLKLSRDDAKPLLRLKGFPSFPLVERQANEVDWWDMVCNVKKLINEKKEDGKVFWQNLAGYKRQEALRPYLSSEEDRKKGKKFARYQLGDLLLHLEKKHGEDWGKVYDEAWERIDKKVEGLSKHIKLEEERRSEDAQSKAALTDWLRAKASFVIEGLKEADKDEFCRCELKLQKWYGDLRGKPFAIEAENSILDISGFSKQYNCAFIWQKDGVKKLNLYLIINYFKGGKLRFKKIKPEAFEANRFYTVINKKSGEIVPMEVNFNFDDPNLIILPLAFGKRQGREFIWNDLLSLETGSLKLANGRVIEKTLYNRRTRQDEPALFVALTFERREVLDSSNIKPMNLIGVDRGENIPAVIALTDPEGCPLSRFKDSLGNPTHILRIGESYKEKQRTIQAKKEVEQRRAGGYSRKYASKAKNLADDMVRNTARDLLYYAVTQDAMLIFENLSRGFGRQGKRTFMAERQYTRMEDWLTAKLAYEGLPSKTYLSKTLAQYTSKTCSVNCGFTITSADYDRVLEKLKKTATGWMTTINGKELKVEGQITYYNRYKRQNVVKDLSVELDRLSEESVNNDISSWTKGRSGEALSLLKKRFSHRPVQEKFVCLNCGFETHADEQAALNIARSWLFLRSQEYKKYQTNKTTGNTDKRAFVETWQSFYRKKLKEVWKPAV

SEQ ID NO: 862 - protein, 978 aa, Artificial Sequence
  CasX Variant
QEIKRINKIRRRLVKDSNTKKAGKTGPMKTLLVRVMTPDLRERLENLRKKPENIPQPISNTSRANLNKLLTDYTEMKKAILHVYWEEFQKDPVGLMSRVAQPASKKIDQNKLKPEMDEKGNLTTAGFACSQCGQPLFVYKLEQVSEKGKAYTNYFGRCNVAEHEKLILLAQLKPEKDSDEAVTYSLGKFGQRALDFYSIHVTKESTHPVKPLAQIAGNRYASGPVGKALSDACMGTIASFLSKYQDIIIEHQKVVKGNQKRLESLRELAGKENLEYPSVTLPPQPHTKEGVDAYNEVIARVRMWVNLNLWQKLKLSRDDAKPLLRLKGFPSFPLVERQANEVDWWDMVCNVKKLINEKKEDGKVFWQNLAGYKRQEALRPYLSSEEDRKKGKKFARYQLGDLLLHLEKKHGEDWGKVYDEAWERIDKKVEGLSKHIKLEEERRSEDAQSKAALTDWLRAKASFVIEGLKEADKDEFCRCELKLQKWYGDLRGKPFAIEAENSILDISGFSKQYNCAFIWQKDGVKKLNLYLIINYFKGGKLRFKKIKPEAFEANRFYTVINKKSGEIVPMEVNFNFDDPNLIILPLAFGKRQGREFIWNDLLSLETGSLKLANGRVIEKTLYNRRTRQDEPALFVALTFERREVLDSSNIKPMNLIGVDRGENIPAVIALTDPEGCPLSRFKDSLGNPTHILRIGESYKEKQRTIQAKKEVEQRRAGGYSRKYASKAKNLADDMVRNTARDLLYYAVTQDAMLIFENLSRGFGRQGKRTFMAERQYTRMEDWLTAKLAYEGLPSKTYLSKTLAQYTPKTCSNCGFTITSADYDRVLEKLKKTATGWMTTINGKELKVEGQITYYNRYKRQNVVKDLSVELDRLSEESVNNDISSWTKGRSGEALSLLKKRFSHRPVQEKFVCLNCGFETHADEQAALNIARSWLFLRSQEYKKYQTNKTTGNTDKRAFVETWQSFYRKKLKEVWKPAV

SEQ ID NO: 863 - protein, 979 aa, Artificial Sequence
  CasX Variant
QEIKRINKIRRRLVKDSNTKKAGKTGPMKTLLVRVMTPDLRERLENLRKKPENIPQPISNTSRANLNKLLTDYTEMKKAILHVYWEEFQKDPVGLMSRVAQPASKKIDQNKLKPEMDEKGNLTTAGFACSQCGQPLFVYKLEQVSEKGKAYTNYFGRCNVAEHEKLILLAQLKPEKDSDEAVTYSLGKFGQRALDFYSIHVTKESTHPVKPLAQIAGNRYASGPVGKALSDACMGTIASFLSKYQDIIIEHQKVVKGNQKRLESLRELAGKENLEYPSVTLPPQPHTKEGVDAYNEVIARVRMWVNLNLWQKLKLSRDDAKPLLRLKGFPSFPLVERQANEVDWWDMVCNVKKLINEKKEDGKVFWQNLAGYKRQEALRPYLSSEEDRKKGKKFARYQLGDLLLHLEKKHGEDWGKVYDEAWERIDKKVEGLSKHIKLEEERRSEDAQSKAALTDWLRAKASFVIEGLKEADKDEFCRCELKLQKWYGDLRGKPFAIEAENSILDISGFSKQYNCAFIWQKDGVKKLNLYLIINYFKGGKLRFKKIKPEAFEANRFYTVINKKSGEIVPMEVNFNFDDPNLIILPLAFGKRQGREFIWNDLLSLETGSLKLANGRVIEKTLYNRRTRQDEPALFVALTFERREVLDSSNIKPMNLIGVDRGENIPAVIALTDPEGCPLSRFKDSLGNPTHILRIGESYKEKQRTIQAKKEVEQRRAGGYSRKYASKAKNLADDMVRNTARDLLYYAVTQDAMLIFENLSRGFGRQGKRTFMAERQYTRMEDWPLTAKLAYEGLPSKTYLSKTLAQYTSKTCSNCGFTITSADYDRVLEKLKKTATGWMTTINGKELKVEGQITYYNRYKRQNVVKDLSVELDRLSEESVNNDISSWTKGRSGEALSLLKKRFSHRPVQEKFVCLNCGFETHADEQAALNIARSWLFLRSQEYKKYQTNKTTGNTDKRAFVETWQSFYRKKLKEVWKPAV

SEQ ID NO: 864 - protein, 979 aa, Artificial Sequence
  CasX Variant
QEIKRINKIRRRLVKDSNTKKAGKTGPMKTLLVRVMTPDLRERLENLRKKPENIPQPISNTSRANLNKLLTDYTEMKKAILHVYWEEFQKDPVGLMSRVAQPASKKIDQNKLKPEMDEKGNLTTAGFACSQCGQPLFVYKLEQVSEKGKAYTNYFGRCNVAEHEKLILLAQLKPEKDSDEAVTYSLGKFGQRALDFYSIHVTKESTHPVKPLAQIAGNRYASGPVGKALSDACMGTIASFLSKYQDIIIEHQKVVKGNQKRLESLRELAGKENLEYPSVTLPPQPHTKEGVDAYNEVIARVRMWVNLNLWQKLKLSRDDAKPLLRLKGFPSFPLVERQANEVDWWDMVCNVKKLINEKKEDGKVFWQNLAGYKRQEALRPYLSSEEDRKKGKKFARYQLGDLLLHLEKKHGEDWGKVYDEAWERIDKKVEGLSKHIKLEEERRSEDAQSKAALTDWLRAKASFVIEGLKEADKDEFCRCELKLQKWYGDLRGKPFAIEAENSILDISGFSKQYNCAFIWQKDGVKKLNLYLIINYFKGGKLRFKKIKPEAFEANRFYTVINKKSGEIVPMEVNFNFDDPNLIILPLAFGKRQGREFIWNDLLSLETGSLKLANGRVIEKTLYNRRTRQDEPALFVALTFERREVLDSSNIKPMNLIGVDRGENIPAVIALTDPEGCPLSRFKDSLGNPTHILRIGESYKEKQRTIQAKKEVEQRRAGGYSRKYASKAKNLADDMVRNTARDLLYYAVTQDAMLIFENLSRGFGRQGKRTFMAERQYTRMEDWLTAKLAYEGLPSKTYLSKTLAQYTSKTCMSNCGFTITSADYDRVLEKLKKTATGWMTTINGKELKVEGQITYYNRYKRQNVVKDLSVELDRLSEESVNNDISSWTKGRSGEALSLLKKRFSHRPVQEKFVCLNCGFETHADEQAALNIARSWLFLRSQEYKKYQTNKTTGNTDKRAFVETWQSFYRKKLKEVWKPAV

SEQ ID NO: 865 - protein, 979 aa, Artificial Sequence
  CasX Variant
QEIKRINKIRRRLVKDSNTKKAGKTGPMKTLLVRVMTPDLRERLENLRKKPENIPQPISNTSRANLNKLLTDYTEMKKAILHVYWEEFQKDPVGLMSRVAQPASKKIDQNKLKPEMDEKGNLTTAGFACSQCGQPLFVYKLEQVSEKGKAYTNYFGRCNVAEHEKLILLAQLKPEKDSDEAVTYSLGKFGQRALDFYSIHVTKESTHPVKPLAQIAGNRYASGPVGKALSDACMGTIASFLSKYQDIIIEHQKVVKGNQKRLESLRELAGKENLEYPSVTLPPQPHTKEGVDAYNEVIARVRMWVNLNLWQKLKLSRDDAKPLLRLKGFPSFPLVERQANEVDWWDMVCNVKKLINEKKEDGKVFWQNLAGYKRQEALRPYLSSEEDRKKGKKFARYQLGDLLLHLEKKHGEDWGKVYDEAWERIDKKVEGLSKHIKLEEERRSEDAQSKAALTDWLRAKASFVIEGLKEADKDEFCRCELKLQKWYGDLRGKPFAIEAENSILDISGFSKQYNCAFIWQKDGVKKLNLYLIINYFKGGKLRFKKIKPEAFEANRFYTVINKKSGEIVPMEVNFNFDDPNLIILPLAFGKRQGREFIWNDLLSLETGSLKLANGRVIEKTLYNRRTRQDEPALFVALTFERREVLDSSNIKPMNLIGVDRGENIPAVIALTDPEGCPLSRFKDSLGNPTHILRIGESYKEKQRTIQAKKEVEQRRAGGYSRKYASKAKNLADDMVRNTARDLLYYAVTQDAMLIFENLSRGFGRQGKRTFMAERQYTRMEDWLTAKLARYEGLPSKTYLSKTLAQYTSKTCSNCGFTITSADYDRVLEKLKKTATGWMTTINGKELKVEGQITYYNRYKRQNVVKDLSVELDRLSEESVNNDISSWTKGRSGEALSLLKKRFSHRPVQEKFVCLNCGFETHADEQAALNIARSWLFLRSQEYKKYQTNKTTGNTDKRAFVETWQSFYRKKLKEVWKPAV

SEQ ID NO: 866 - protein, 978 aa, Artificial Sequence
  CasX Variant
QEIKRINKIRRRLVKDSNTKKAGKTGPMKTLLVRVMTPDLRERLENLRKKPENIPQPISNTSRANLNKLLTDYTEMKKAILHVYWEEFQKDPVGLMSRVAQPASKKIDQNKLKPEMDEKGNLTTAGFACSQCGQPLFVYKLEQVSEKGKAYTNYFGRCNVAEHEKLILLAQLKPEKDSDEAVTYSLGKFGQRALDFYSIHVTKESTHPVKPLAQIAGNRYASGPVGKALSDACMGTIASFLSKYQDIIIEHQKVVKGNQKRLESLRELAGKENLEYPSVTLPPQPHTKEGVDAYNEVIARVRMWVNLNLWQKLKLSRDDAKPLLRLKGFPSFPLVERQANEVDWWDMVCNVKKLINEKKEDGKVFWQNLAGYKRQEALRPYLSSEEDRKKGKKFARYQLGDLLLHLEKKHGEDWGKVYDEAWERIDKKVEGLSKHIKLEEERRSEDAQSKAALTDWLRAKASFVIEGLKEADKDEFCRCELKLQKWYGDLRGKPFAIEAENSILDISGFSKQYNCAFIWQKDGVKKLNLYLIINYFKGGKLRFKKIKPEAFEANRFYTVINKKSGEIVPMEVNFNFDDPNLIILPLAFGKRQGREFIWNDLLSLETGSLKLANGRVIEKTLYNRRTRQDEPALFVALTFERREVLDSSNIKPMNLIGVDRGENIPAVIALTDPEGCPLSRFKDSLGNPTHILRIGESYKEKQRTIQAKKEVEQRRAGGYSRKYASKAKNLADDMVRNTARDLLYYAVTQDAMLIFENLSRGFGRQGKRTFMAERQYTRMEDWLTAKLAYEGLPSKTYLSKTLAQYFSKTCSNCGFTITSADYDRVLEKLKKTATGWMTTINGKELKVEGQITYYNRYKRQNVVKDLSVELDRLSEESVNNDISSWTKGRSGEALSLLKKRFSHRPVQEKFVCLNCGFETHADEQAALNIARSWLFLRSQEYKKYQTNKTTGNTDKRAFVETWQSFYRKKLKEVWKPAV

SEQ ID NO: 867 - protein, 977 aa, Artificial Sequence
  CasX Variant
QEIKRINKIRRRLVKDSNTKKAGKTGPMKTLLVRVMTPDLRERLENLRKKPENIPQPISNTSRANLNKLLTDYTEMKKAILHVYWEEFQKDPVGLMSRVAQPASKKIDQNKLKPEMDEKGNLTTAGFACSQCGQPLFVYKLEQVSEKGKAYTNYFGRCNVAEHEKLILLAQLKPEKDSDEAVTYSLGKFGQRALDFYSIHVTKESTHPVKPLAQIAGNRYASGPVGKALSDACMGTIASFLSKYQDIIIEHQKVVKGNQKRLESLRELAGKENLEYPSVTLPPQPHTKEGVDAYNEVIARVRMWVNLNLWQKLKLSRDDAKPLLRLKGFPSFPLVERQANEVDWWDMVCNVKKLINEKKEDGKVFWQNLAGYKRQEALRPYLSSEEDRKKGKKFARYQLGDLLLHLEKKHGEDWGKVYDEAWERIDKKVEGLSKHIKLEEERRSEDAQSKAALTDWLRAKASFVIEGLKEADKDEFCRCELKLQKWYGDLRGKPFAIEAENSILDISGFSKQYNCAFIWQKDGVKKLNLYLIINYFKGGKLRFKKIKPEAFEANRFYTVINKKSGEIVPMEVNFNFDDPNLIILPLAFGKRQGREFIWNDLLSLETGSLKLANGRVIEKTLYNRRTRQDEPALFVALTFERREVLDSSNIKPMNLIGVDRGENIPAVIALTDPEGCPLSRFKDSLGNPTHILRIGESYKEKQRTIQAKKEVEQRRAGGYSRKYASKAKNLADDMVRNTARDLLYYAVTQDAMLIFENLSRGFGRQGKRTFMAERQYTRMEDWLTAKAYEGLPSKTYLSKTLAQYTSKTCSNCGFTITSADYDRVLEKLKKTATGWMTTINGKELKVEGQITYYNRYKRQNVVKDLSVELDRLSEESVNNDISSWTKGRSGEALSLLKKRFSHRPVQEKFVCLNCGFETHADEQAALNIARSWLFLRSQEYKKYQTNKTTGNTDKRAFVETWQSFYRKKLKEVWKPAV

SEQ ID NO: 868 - protein, 978 aa, Artificial Sequence
  CasX Variant
QEIKRINKIRRRLVKDSNTKKAGKTGPMKTLLVRVMTPDLRERLENLRKKPENIPQPISNTSRANLNKLLTDYTEMKKAILHVYWEEFQKDPVGLMSRVAQPASKKIDQNKLKPEMDEKGNLTTAGFACSQCGQPLFVYKLEQVSEKGKAYTNYFGRCNVAEHEKLILLAQLKPEKDSDEAVTYSLGKFGQRALDFYSIHVTKESTHPVKPLAQIAGNRYASGPVGKALSDACMGTIASFLSKYQDIIIEHQKVVKGNQKRLESLRELAGKENLEYPSVTLPPQPHTKEGVDAYNEVIARVRMWVNLNLWQKLKLSRDDAKPLLRLKGFPSFPLVERQANEVDWWDMVCNVKKLINEKKEDGKVFWQNLAGYKRQEALRPYLSSEEDRKKGKKFARYQLGDLLLHLEKKHGEDWGKVYDEAWERIDKKVEGLSKHIKLEEERRSEDAQSKAALTDWLRAKASFVIEGLKEADKDEFCRCELKLQKWYGDLRGKPFAIEAENSILDISGFSKQYNCAFIWQKDGVKKLNLYLIINYFKGGKLRFKKIKPEAFEANRFYTVINKKSGEIVPMEVNFNFDDPNLIILPLAFGKRQGREFIWNDLLSLETGSLKLANGRVIEKTLYNRRTRQDEPALFVALTFERREVLDSSNIKPMNLIGVDRGENIPAVIALTDPEGCPLSRFKDSLGNPTHILRIGESYKEKQRTIQAKKEVEQRRAGGYSRKYASKAKNLADDMVRNTARDLLYYAVTQDAMLIFENLSRGFGRQGKRTFMAERQYTRMEDWLTAKLAYEGLPSQTYLSKTLAQYTSKTCSNCGFTITSADYDRVLEKLKKTATGWMTTINGKELKVEGQITYYNRYKRQNVVKDLSVELDRLSEESVNNDISSWTKGRSGEALSLLKKRFSHRPVQEKFVCLNCGFETHADEQAALNIARSWLFLRSQEYKKYQTNKTTGNTDKRAFVETWQSFYRKKLKEVWKPAV

SEQ ID NO: 869 - protein, 978 aa, Artificial Sequence
  CasX Variant
QEIKRINKIRRRLVKDSNTKKAGKTGPMKTLLVRVMTPDLRERLENLRKKPENIPQPISNTSRANLNKLLTDYTEMKKAILHVYWEEFQKDPVGLMSRVAQPASKKIDQNKLKPEMDEKGNLTTAGFACSQCGQPLFVYKLEQVSEKGKAYTNYFGRCNVAEHEKLILLAQLKPEKDSDEAVTYSLGKFGQRALDFYSIHVTKESTHPVKPLAQIAGNRYASGPVGKALSDACMGTIASFLSKYQDIIIEHQKVVKGNQKRLESLRELAGKENLEYPSVTLPPQPHTKEGVDAYNEVIARVRMWVNLNLWQKLKLSRDDAKPLLRLKGFPSFPLVERQANEVDWWDMVCNVKKLINEKKEDGKVFWQNLAGYKRQEALRPYLSSEEDRKKGKKFARYQLGDLLLHLEKKHGEDWGKVYDEAWERIDKKVEGLSKHIKLEEERRSEDAQSKAALTDWLRAKASFVIEGLKEADKDEFCRCELKLQKWYGDLRGKPFAIEAENSILDISGFSKQYNCAFIWQKDGVKKLNLYLIINYFKGGKLRFKKIKPEAFEANRFYTVINKKSGEIVPMEVNFNFDDPNLIILPLAFGKRQGREFIWNDLLSLETGSLKLANGRVIEKTLYNRRTRQDEPALFVALTFERREVLDSSNIKPMNLIGVDRGENIPAVIALTDPEGCPLSRFKDSLGNPTHILRIGESYKEKQRTIQAKKEVEQRRAGGYSRKYASKAKNLADDMVRNTARDLLYYAVTQDAMLIFENLSRGFGRQGKRTFMAERQYTRMEDWLTAKLAYNGLPSKTYLSKTLAQYTSKTCSNCGFTITSADYDRVLEKLKKTATGWMTTINGKELKVEGQITYYNRYKRQNVVKDLSVELDRLSEESVNNDISSWTKGRSGEALSLLKKRFSHRPVQEKFVCLNCGFETHADEQAALNIARSWLFLRSQEYKKYQTNKTTGNTDKRAFVETWQSFYRKKLKEVWKPAV

SEQ ID NO: 870 - protein, 979 aa, Artificial Sequence
  CasX Variant
QEIKRINKIRRRLVKDSNTKKAGKTGPMKTLLVRVMTPDLRERLENLRKKPENIPQPISNTSRANLNKLLTDYTEMKKAILHVYWEEFQKDPVGLMSRVAQPASKKIDQNKLKPEMDEKGNLTTAGFACSQCGQPLFVYKLEQVSEKGKAYTNYFGRCNVAEHEKLILLAQLKPEKDSDEAVTYSLGKFGQRALDFYSIHVTKESTHPVKPLAQIAGNRYASGPVGKALSDACMGTIASFLSKYQDIIIEHQKVVKGNQKRLESLRELAGKENLEYPSVTLPPQPHTKEGVDAYNEVIARVRMWVNLNLWQKLKLSRDDAKPLLRLKGFPSFPLVERQANEVDWWDMVCNVKKLINEKKEDGKVFWQNLAGYKRQEALRPYLSSEEDRKKGKKFARYQLGDLLLHLEKKHGEDWGKVYDEAWERIDKKVEGLSKHIKLEEERRSEDAQSKAALTDWLRAKASFVIEGLKEADKDEFCRCELKLQKWYGDLRGKPFAIEAENSILDISGFSKQYNCAFIWQKDGVKKLNLYLIINYFKGGKLRFKKIKPEAFEANRFYTVINKKSGEIVPMEVNFNFDDPNLIILPLAFGKRQGREFIWNDLLSLETGSLKLANGRVIEKTLYNRRTRQDEPALFVALTFERREVLDSSNIKPMNLIGVDRGENIPAVIALTDPEGCPLSRFKDSLGNPTHILRIGESYKEKQRTIQAKKEVEQRRAGGYSRKYASKAKNLADDMVRNTARDLLYYAVTQDAMLIFENLSRGFGRQGKRTFMAERQYTRMEDWLTAKLAYEGLPSKTYLHSKTLAQYTSKTCSNCGFTITSADYDRVLEKLKKTATGWMTTINGKELKVEGQITYYNRYKRQNVVKDLSVELDRLSEESVNNDISSWTKGRSGEALSLLKKRFSHRPVQEKFVCLNCGFETHADEQAALNIARSWLFLRSQEYKKYQTNKTTGNTDKRAFVETWQSFYRKKLKEVWKPAV

SEQ ID NO: 871 - protein, 978 aa, Artificial Sequence
  CasX Variant
QEIKRINKIRRRLVKDSNTKKAGKTGPMKTLLVRVMTPDLRERLENLRKKPENIPQPISNTSRANLNKLLTDYTEMKKAILHVYWEEFQKDPVGLMSRVAQPASKKIDQNKLKPEMDEKGNLTTAGFACSQCGQPLFVYKLEQVSEKGKAYTNYFGRCNVAEHEKLILLAQLKPEKDSDEAVTYSLGKFGQRALDFYSIHVTKESTHPVKPLAQIAGNRYASGPVGKALSDACMGTIASFLSKYQDIIIEHQKVVKGNQKRLESLRELAGKENLEYPSVTLPPQPHTKEGVDAYNEVIARVRMWVNLNLWQKLKLSRDDAKPLLRLKGFPSFPLVERQANEVDWWDMVCNVKKLINEKKEDGKVFWQNLAGYKRQEALRPYLSSEEDRKKGKKFARYQLGDLLLHLEKKHGEDWGKVYDEAWERIDKKVEGLSKHIKLEEERRSEDAQSKAALTDWLRAKASFVIEGLKEADKDEFCRCELKLQKWYGDLRGKPFAIEAENSILDISGFSKQYNCAFIWQKDGVKKLNLYLIINYFKGGKLRFKKIKPEAFEANRFYTVINKKSGEIVPMEVNFNFDDPNLIILPLAFGKRQGREFIWNDLLSLETGSLKLANGRVIEKTLYNRRTRQDEPALFVALTFERREVLDSSNIKPMNLIGVDRGENIPAVIALTDPEGCPLSRFKDSLGNPTHILRIGESYKEKQRTIQAKKEVEQRRAGGYSRKYASKAKNLADDMVRNTARDLLYYAVTQDAMLIFENLSRGFGRQGKRTFMAERQYTRMEDWLTAKLAYEGLPSKVYLSKTLAQYTSKTCSNCGFTITSADYDRVLEKLKKTATGWMTTINGKELKVEGQITYYNRYKRQNVVKDLSVELDRLSEESVNNDISSWTKGRSGEALSLLKKRFSHRPVQEKFVCLNCGFETHADEQAALNIARSWLFLRSQEYKKYQTNKTTGNTDKRAFVETWQSFYRKKLKEVWKPAV

SEQ ID NO: 872 - protein, 979 aa, Artificial Sequence
  CasX Variant
QEIKRINKIRRRLVKDSNTKKAGKTGPMKTLLVRVMTPDLRERLENLRKKPENIPQPISNTSRANLNKLLTDYTEMKKAILHVYWEEFQKDPVGLMSRVAQPASKKIDQNKLKPEMDEKGNLTTAGFACSQCGQPLFVYKLEQVSEKGKAYTNYFGRCNVAEHEKLILLAQLKPEKDSDEAVTYSLGKFGQRALDFYSIHVTKESTHPVKPLAQIAGNRYASGPVGKALSDACMGTIASFLSKYQDIIIEHQKVVKGNQKRLESLRELAGKENLEYPSVTLPPQPHTKEGVDAYNEVIARVRMWVNLNLWQKLKLSRDDAKPLLRLKGFPSFPLVERQANEVDWWDMVCNVKKLINEKKEDGKVFWQNLAGYKRQEALRPYLSSEEDRKKGKKFARYQLGDLLLHLEKKHGEDWGKVYDEAWERIDKKVEGLSKHIKLEEERRSEDAQSKAALTDWLRAKASFVIEGLKEADKDEFCRCELKLQKWYGDLRGKPFAIEAENSILDISGFSKQYNCAFIWQKDGVKKLNLYLIINYFKGGKLRFKKIKPEAFEANRFYTVINKKSGEIVPMEVNFNFDDPNLIILPLAFGKRQGREFIWNDLLSLETGSLKLANGRVIEKTLYNRRTRQDEPALFVALTFERREVLDSSNIKPMNLIGVDRGENIPAVIALTDPEGCPLSRFKDSLGNPTHILRIGESYKEKQRTIQAKKEVEQRRAGGYSRKYASKAKNLADDMVRNTARDLLYYAVTQDAMLIFENLSRGFGRQGKRTFMAERQYTRMEDWLTAKLQAYEGLPSKTYLSKTLAQYTSKTCSNCGFTITSADYDRVLEKLKKTATGWMTTINGKELKVEGQITYYNRYKRQNVVKDLSVELDRLSEESVNNDISSWTKGRSGEALSLLKKRFSHRPVQEKFVCLNCGFETHADEQAALNIARSWLFLRSQEYKKYQTNKTTGNTDKRAFVETWQSFYRKKLKEVWKPAV

SEQ ID NO: 873 - protein, 979 aa, Artificial Sequence
  CasX Variant
QEIKRINKIRRRLVKDSNTKKAGKTGPMKTLLVRVMTPDLRERLENLRKKPENIPQPISNTSRANLNKLLTDYTEMKKAILHVYWEEFQKDPVGLMSRVAQPASKKIDQNKLKPEMDEKGNLTTAGFACSQCGQPLFVYKLEQVSEKGKAYTNYFGRCNVAEHEKLILLAQLKPEKDSDEAVTYSLGKFGQRALDFYSIHVTKESTHPVKPLAQIAGNRYASGPVGKALSDACMGTIASFLSKYQDIIIEHQKVVKGNQKRLESLRELAGKENLEYPSVTLPPQPHTKEGVDAYNEVIARVRMWVNLNLWQKLKLSRDDAKPLLRLKGFPSFPLVERQANEVDWWDMVCNVKKLINEKKEDGKVFWQNLAGYKRQEALRPYLSSEEDRKKGKKFARYQLGDLLLHLEKKHGEDWGKVYDEAWERIDKKVEGLSKHIKLEEERRSEDAQSKAALTDWLRAKASFVIEGLKEADKDEFCRCELKLQKWYGDLRGKPFAIEAENSILDISGFSKQYNCAFIWQKDGVKKLNLYLIINYFKGGKLRFKKIKPEAFEANRFYTVINKKSGEIVPMEVNFNFDDPNLIILPLAFGKRQGREFIWNDLLSLETGSLKLANGRVIEKTLYNRRTRQDEPALFVALTFERREVLDSSNIKPMNLIGVDRGENIPAVIALTDPEGCPLSRFKDSLGNPTHILRIGESYKEKQRTIQAKKEVEQRRAGGYSRKYASKAKNLADDMVRNTARDLLYYAVTQDAMLIFENLSRGFGRQGKRTFMAERQYTRMEDWLTAKLAYEGPLPSKTYLSKTLAQYTSKTCSNCGFTITSADYDRVLEKLKKTATGWMTTINGKELKVEGQITYYNRYKRQNVVKDLSVELDRLSEESVNNDISSWTKGRSGEALSLLKKRFSHRPVQEKFVCLNCGFETHADEQAALNIARSWLFLRSQEYKKYQTNKTTGNTDKRAFVETWQSFYRKKLKEVWKPAV

SEQ ID NO: 874 - protein, 979 aa, Artificial Sequence
  CasX Variant
QEIKRINKIRRRLVKDSNTKKAGKTGPMKTLLVRVMTPDLRERLENLRKKPENIPQPISNTSRANLNKLLTDYTEMKKAILHVYWEEFQKDPVGLMSRVAQPASKKIDQNKLKPEMDEKGNLTTAGFACSQCGQPLFVYKLEQVSEKGKAYTNYFGRCNVAEHEKLILLAQLKPEKDSDEAVTYSLGKFGQRALDFYSIHVTKESTHPVKPLAQIAGNRYASGPVGKALSDACMGTIASFLSKYQDIIIEHQKVVKGNQKRLESLRELAGKENLEYPSVTLPPQPHTKEGVDAYNEVIARVRMWVNLNLWQKLKLSRDDAKPLLRLKGFPSFPLVERQANEVDWWDMVCNVKKLINEKKEDGKVFWQNLAGYKRQEALRPYLSSEEDRKKGKKFARYQLGDLLLHLEKKHGEDWGKVYDEAWERIDKKVEGLSKHIKLEEERRSEDAQSKAALTDWLRAKASFVIEGLKEADKDEFCRCELKLQKWYGDLRGKPFAIEAENSILDISGFSKQYNCAFIWQKDGVKKLNLYLIINYFKGGKLRFKKIKPEAFEANRFYTVINKKSGEIVPMEVNFNFDDPNLIILPLAFGKRQGREFIWNDLLSLETGSLKLANGRVIEKTLYNRRTRQDEPALFVALTFERREVLDSSNIKPMNLIGVDRGENIPAVIALTDPEGCPLSRFKDSLGNPTHILRIGESYKEKQRTIQAKKEVEQRRAGGYSRKYASKAKNLADDMVRNTARDLLYYAVTQDAMLIFENLSRGFGRQGKRTFMAERQYTRMEDWLTAKLAYEGLPSKTYLSKRTLAQYTSKTCSNCGFTITSADYDRVLEKLKKTATGWMTTINGKELKVEGQITYYNRYKRQNVVKDLSVELDRLSEESVNNDISSWTKGRSGEALSLLKKRFSHRPVQEKFVCLNCGFETHADEQAALNIARSWLFLRSQEYKKYQTNKTTGNTDKRAFVETWQSFYRKKLKEVWKPAV

SEQ ID NO: 875 - protein, 979 aa, Artificial Sequence
  CasX Variant
QEIKRINKIRRRLVKDSNTKKAGKTGPMKTLLVRVMTPDLRERLENLRKKPENIPQPISNTSRANLNKLLTDYTEMKKAILHVYWEEFQKDPVGLMSRVAQPASKKIDQNKLKPEMDEKGNLTTAGFACSQCGQPLFVYKLEQVSEKGKAYTNYFGRCNVAEHEKLILLAQLKPEKDSDEAVTYSLGKFGQRALDFYSIHVTKESTHPVKPLAQIAGNRYASGPVGKALSDACMGTIASFLSKYQDIIIEHQKVVKGNQKRLESLRELAGKENLEYPSVTLPPQPHTKEGVDAYNEVIARVRMWVNLNLWQKLKLSRDDAKPLLRLKGFPSFPLVERQANEVDWWDMVCNVKKLINEKKEDGKVFWQNLAGYKRQEALRPYLSSEEDRKKGKKFARYQLGDLLLHLEKKHGEDWGKVYDEAWERIDKKVEGLSKHIKLEEERRSEDAQSKAALTDWLRAKASFVIEGLKEADKDEFCRCELKLQKWYGDLRGKPFAIEAENSILDISGFSKQYNCAFIWQKDGVKKLNLYLIINYFKGGKLRFKKIKPEAFEANRFYTVINKKSGEIVPMEVNFNFDDPNLIILPLAFGKRQGREFIWNDLLSLETGSLKLANGRVIEKTLYNRRTRQDEPALFVALTFERREVLDSSNIKPMNLIGVDRGENIPAVIALTDPEGCPLSRFKDSLGNPTHILRIGESYKEKQRTIQAKKEVEQRRAGGYSRKYASKAKNLADDMVRNTARDLLYYAVTQDAMLIFENLSRGFGRQGKRTFMAERQYTRMEDWLTAKLAYEGLPSKTYLSKTLAQYTSKTCSNCWGFTITSADYDRVLEKLKKTATGWMTTINGKELKVEGQITYYNRYKRQNVVKDLSVELDRLSEESVNNDISSWTKGRSGEALSLLKKRFSHRPVQEKFVCLNCGFETHADEQAALNIARSWLFLRSQEYKKYQTNKTTGNTDKRAFVETWQSFYRKKLKEVWKPAV

SEQ ID NO: 876 - protein, 979 aa, Artificial Sequence
  CasX Variant
QEIKRINKIRRRLVKDSNTKKAGKTGPMKTLLVRVMTPDLRERLENLRKKPENIPQPISNTSRANLNKLLTDYTEMKKAILHVYWEEFQKDPVGLMSRVAQPASKKIDQNKLKPEMDEKGNLTTAGFACSQCGQPLFVYKLEQVSEKGKAYTNYFGRCNVAEHEKLILLAQLKPEKDSDEAVTYSLGKFGQRALDFYSIHVTKESTHPVKPLAQIAGNRYASGPVGKALSDACMGTIASFLSKYQDIIIEHQKVVKGNQKRLESLRELAGKENLEYPSVTLPPQPHTKEGVDAYNEVIARVRMWVNLNLWQKLKLSRDDAKPLLRLKGFPSFPLVERQANEVDWWDMVCNVKKLINEKKEDGKVFWQNLAGYKRQEALRPYLSSEEDRKKGKKFARYQLGDLLLHLEKKHGEDWGKVYDEAWERIDKKVEGLSKHIKLEEERRSEDAQSKAALTDWLRAKASFVIEGLKEADKDEFCRCELKLQKWYGDLRGKPFAIEAENSILDISGFSKQYNCAFIWQKDGVKKLNLYLIINYFKGGKLRFKKIKPEAFEANRFYTVINKKSGEIVPMEVNFNFDDPNLIILPLAFGKRQGREFIWNDLLSLETGSLKLANGRVIEKTLYNRRTRQDEPALFVALTFERREVLDSSNIKPMNLIGVDRGENIPAVIALTDPEGCPLSRFKDSLGNPTHILRIGESYKEKQRTIQAKKEVEQRRAGGYSRKYASKAKNLADDMVRNTARDLLYYAVTQDAMLIFENLSRGFGRQGKRTFMAERQYTRMEDWLTAKLANYEGLPSKTYLSKTLAQYTSKTCSNCGFTITSADYDRVLEKLKKTATGWMTTINGKELKVEGQITYYNRYKRQNVVKDLSVELDRLSEESVNNDISSWTKGRSGEALSLLKKRFSHRPVQEKFVCLNCGFETHADEQAALNIARSWLFLRSQEYKKYQTNKTTGNTDKRAFVETWQSFYRKKLKEVWKPAV

SEQ ID NO: 877 - protein, 978 aa, Artificial Sequence
  CasX Variant
QEIKRINKIRRRLVKDSNTKKAGKTGPMKTLLVRVMTPDLRERLENLRKKPENIPQPISNTSRANLNKLLTDYTEMKKAILHVYWEEFQKDPVGLMSRVAQPASKKIDQNKLKPEMDEKGNLTTAGFACSQCGQPLFVYKLEQVSEKGKAYTNYFGRCNVAEHEKLILLAQLKPEKDSDEAVTYSLGKFGQRALDFYSIHVTKESTHPVKPLAQIAGNRYASGPVGKALSDACMGTIASFLSKYQDIIIEHQKVVKGNQKRLESLRELAGKENLEYPSVTLPPQPHTKEGVDAYNEVIARVRMWVNLNLWQKLKLSRDDAKPLLRLKGFPSFPLVERQANEVDWWDMVCNVKKLINEKKEDGKVFWQNLAGYKRQEALRPYLSSEEDRKKGKKFARYQLGDLLLHLEKKHGEDWGKVYDEAWERIDKKVEGLSKHIKLEEERRSEDAQSKAALTDWLRAKASFVIEGLKEADKDEFCRCELKLQKWYGDLRGKPFAIEAENSILDISGFSKQYNCAFIWQKDGVKKLNLYLIINYFKGGKLRFKKIKPEAFEANRFYTVINKKSGEIVPMEVNFNFDDPNLIILPLAFGKRQGREFIWNDLLSLETGSLKLANGRVIEKTLYNRRTRQDEPALFVALTFERREVLDSSNIKPMNLIGVDRGENIPAVIALTDPEGCPLSRFKDSLGNPTHILRIGESYKEKQRTIQAKKEVEQRRAGGYSRKYASKAKNLADDMVRNTARDLLYYAVTQDAMLIFENLSRGFGRQGKRTFMAERQYTRMEDWLTAKLAYEGLPSKTYLSKTLAQYTSKTCSNSGFTITSADYDRVLEKLKKTATGWMTTINGKELKVEGQITYYNRYKRQNVVKDLSVELDRLSEESVNNDISSWTKGRSGEALSLLKKRFSHRPVQEKFVCLNCGFETHADEQAALNIARSWLFLRSQEYKKYQTNKTTGNTDKRAFVETWQSFYRKKLKEVWKPAV

SEQ ID NO: 878 - protein, 978 aa, Artificial Sequence
  CasX Variant
QEIKRINKIRRRLVKDSNTKKAGKTGPMKTLLVRVMTPDLRERLENLRKKPENIPQPISNTSRANLNKLLTDYTEMKKAILHVYWEEFQKDPVGLMSRVAQPASKKIDQNKLKPEMDEKGNLTTAGFACSQCGQPLFVYKLEQVSEKGKAYTNYFGRCNVAEHEKLILLAQLKPEKDSDEAVTYSLGKFGQRALDFYSIHVTKESTHPVKPLAQIAGNRYASGPVGKALSDACMGTIASFLSKYQDIIIEHQKVVKGNQKRLESLRELAGKENLEYPSVTLPPQPHTKEGVDAYNEVIARVRMWVNLNLWQKLKLSRDDAKPLLRLKGFPSFPLVERQANEVDWWDMVCNVKKLINEKKEDGKVFWQNLAGYKRQEALRPYLSSEEDRKKGKKFARYQLGDLLLHLEKKHGEDWGKVYDEAWERIDKKVEGLSKHIKLEEERRSEDAQSKAALTDWLRAKASFVIEGLKEADKDEFCRCELKLQKWYGDLRGKPFAIEAENSILDISGFSKQYNCAFIWQKDGVKKLNLYLIINYFKGGKLRFKKIKPEAFEANRFYTVINKKSGEIVPMEVNFNFDDPNLIILPLAFGKRQGREFIWNDLLSLETGSLKLANGRVIEKTLYNRRTRQDEPALFVALTFERREVLDSSNIKPMNLIGVDRGENIPAVIALTDPEGCPLSRFKDSLGNPTHILRIGESYKEKQRTIQAKKEVEQRRAGGYSRKYASKAKNLADDMVRNTARDLLYYAVTQDAMLIFENLSRGFGRQGKRTFMAERQYTRMEDWLTAKLAYEGLPSKTYLSKTLSQYTSKTCSNCGFTITSADYDRVLEKLKKTATGWMTTINGKELKVEGQITYYNRYKRQNVVKDLSVELDRLSEESVNNDISSWTKGRSGEALSLLKKRFSHRPVQEKFVCLNCGFETHADEQAALNIARSWLFLRSQEYKKYQTNKTTGNTDKRAFVETWQSFYRKKLKEVWKPAV

SEQ ID NO: 879 - protein, 979 aa, Artificial Sequence
  CasX Variant
QEIKRINKIRRRLVKDSNTKKAGKTGPMKTLLVRVMTPDLRERLENLRKKPENIPQPISNTSRANLNKLLTDYTEMKKAILHVYWEEFQKDPVGLMSRVAQPASKKIDQNKLKPEMDEKGNLTTAGFACSQCGQPLFVYKLEQVSEKGKAYTNYFGRCNVAEHEKLILLAQLKPEKDSDEAVTYSLGKFGQRALDFYSIHVTKESTHPVKPLAQIAGNRYASGPVGKALSDACMGTIASFLSKYQDIIIEHQKVVKGNQKRLESLRELAGKENLEYPSVTLPPQPHTKEGVDAYNEVIARVRMWVNLNLWQKLKLSRDDAKPLLRLKGFPSFPLVERQANEVDWWDMVCNVKKLINEKKEDGKVFWQNLAGYKRQEALRPYLSSEEDRKKGKKFARYQLGDLLLHLEKKHGEDWGKVYDEAWERIDKKVEGLSKHIKLEEERRSEDAQSKAALTDWLRAKASFVIEGLKEADKDEFCRCELKLQKWYGDLRGKPFAIEAENSILDISGFSKQYNCAFIWQKDGVKKLNLYLIINYFKGGKLRFKKIKPEAFEANRFYTVINKKSGEIVPMEVNFNFDDPNLIILPLAFGKRQGREFIWNDLLSLETGSLKLANGRVIEKTLYNRRTRQDEPALFVALTFERREVLDSSNIKPMNLIGVDRGENIPAVIALTDPEGCPLSRFKDSLGNPTHILRIGESYKEKQRTIQAKKEVEQRRAGGYSRKYASKAKNLADDMVRNTARDLLYYAVTQDAMLIFENLSRGFGRQGKRTFMAERQYTRMEDWLTAKLAYEGLPSKTYRLSKTLAQYTSKTCSNCGFTITSADYDRVLEKLKKTATGWMTTINGKELKVEGQITYYNRYKRQNVVKDLSVELDRLSEESVNNDISSWTKGRSGEALSLLKKRFSHRPVQEKFVCLNCGFETHADEQAALNIARSWLFLRSQEYKKYQTNKTTGNTDKRAFVETWQSFYRKKLKEVWKPAV

SEQ ID NO: 880 - protein, 978 aa, Artificial Sequence
  CasX Variant
QEIKRINKIRRRLVKDSNTKKAGKTGPMKTLLVRVMTPDLRERLENLRKKPENIPQPISNTSRANLNKLLTDYTEMKKAILHVYWEEFQKDPVGLMSRVAQPASKKIDQNKLKPEMDEKGNLTTAGFACSQCGQPLFVYKLEQVSEKGKAYTNYFGRCNVAEHEKLILLAQLKPEKDSDEAVTYSLGKFGQRALDFYSIHVTKESTHPVKPLAQIAGNRYASGPVGKALSDACMGTIASFLSKYQDIIIEHQKVVKGNQKRLESLRELAGKENLEYPSVTLPPQPHTKEGVDAYNEVIARVRMWVNLNLWQKLKLSRDDAKPLLRLKGFPSFPLVERQANEVDWWDMVCNVKKLINEKKEDGKVFWQNLAGYKRQEALRPYLSSEEDRKKGKKFARYQLGDLLLHLEKKHGEDWGKVYDEAWERIDKKVEGLSKHIKLEEERRSEDAQSKAALTDWLRAKASFVIEGLKEADKDEFCRCELKLQKWYGDLRGKPFAIEAENSILDISGFSKQYNCAFIWQKDGVKKLNLYLIINYFKGGKLRFKKIKPEAFEANRFYTVINKKSGEIVPMEVNFNFDDPNLIILPLAFGKRQGREFIWNDLLSLETGSLKLANGRVIEKTLYNRRTRQDEPALFVALTFERREVLDSSNIKPMNLIGVDRGENIPAVIALTDPEGCPLSRFKDSLGNPTHILRIGESYKEKQRTIQAKKEVEQRRAGGYSRKYASKAKNLADDMVRNTARDLLYYAVTQDAMLIFENLSRGFGRQGKRTFMAERQYTRMEDWLTAKRAYEGLPSKTYLSKTLAQYTSKTCSNCGFTITSADYDRVLEKLKKTATGWMTTINGKELKVEGQITYYNRYKRQNVVKDLSVELDRLSEESVNNDISSWTKGRSGEALSLLKKRFSHRPVQEKFVCLNCGFETHADEQAALNIARSWLFLRSQEYKKYQTNKTTGNTDKRAFVETWQSFYRKKLKEVWKPAV

SEQ ID NO: 881 - protein, 978 aa, Artificial Sequence
  CasX Variant
QEIKRINKIRRRLVKDSNTKKAGKTGPMKTLLVRVMTPDLRERLENLRKKPENIPQPISNTSRANLNKLLTDYTEMKKAILHVYWEEFQKDPVGLMSRVAQPASKKIDQNKLKPEMDEKGNLTTAGFACSQCGQPLFVYKLEQVSEKGKAYTNYFGRCNVAEHEKLILLAQLKPEKDSDEAVTYSLGKFGQRALDFYSIHVTKESTHPVKPLAQIAGNRYASGPVGKALSDACMGTIASFLSKYQDIIIEHQKVVKGNQKRLESLRELAGKENLEYPSVTLPPQPHTKEGVDAYNEVIARVRMWVNLNLWQKLKLSRDDAKPLLRLKGFPSFPLVERQANEVDWWDMVCNVKKLINEKKEDGKVFWQNLAGYKRQEALRPYLSSEEDRKKGKKFARYQLGDLLLHLEKKHGEDWGKVYDEAWERIDKKVEGLSKHIKLEEERRSEDAQSKAALTDWLRAKASFVIEGLKEADKDEFCRCELKLQKWYGDLRGKPFAIEAENSILDISGFSKQYNCAFIWQKDGVKKLNLYLIINYFKGGKLRFKKIKPEAFEANRFYTVINKKSGEIVPMEVNFNFDDPNLIILPLAFGKRQGREFIWNDLLSLETGSLKLANGRVIEKTLYNRRTRQDEPALFVALTFERREVLDSSNIKPMNLIGVDRGENIPAVIALTDPEGCPLSRFKDSLGNPTHILRIGESYKEKQRTIQAKKEVEQRRAGGYSRKYASKAKNLADDMVRNTARDLLYYAVTQDAMLIFENLSRGFGRQGKRTFMAERQYTRMEDWLTAKDAYEGLPSKTYLSKTLAQYTSKTCSNCGFTITSADYDRVLEKLKKTATGWMTTINGKELKVEGQITYYNRYKRQNVVKDLSVELDRLSEESVNNDISSWTKGRSGEALSLLKKRFSHRPVQEKFVCLNCGFETHADEQAALNIARSWLFLRSQEYKKYQTNKTTGNTDKRAFVETWQSFYRKKLKEVWKPAV

SEQ ID NO: 882 - protein, 978 aa, Artificial Sequence
  CasX Variant
QEIKRINKIRRRLVKDSNTKKAGKTGPMKTLLVRVMTPDLRERLENLRKKPENIPQPISNTSRANLNKLLTDYTEMKKAILHVYWEEFQKDPVGLMSRVAQPASKKIDQNKLKPEMDEKGNLTTAGFACSQCGQPLFVYKLEQVSEKGKAYTNYFGRCNVAEHEKLIQLAQLKPEKDSDEAVTYSLGKFGQRALDFYSIHVTKESTHPVKPLAQIAGNRYASGPVGKALSDACMGTIASFLSKYQDIIIEHQKVVKGNQKRLESLRELAGKENLEYPSVTLPPQPHTKEGVDAYNEVIARVRMWVNLNLWQKLKLSRDDAKPLLRLKGFPSFPLVERQANEVDWWDMVCNVKKLINEKKEDGKVFWQNLAGYKRQEALRPYLSSEEDRKKGKKFARYQLGDLLLHLEKKHGEDWGKVYDEAWERIDKKVEGLSKHIKLEEERRSEDAQSKAALTDWLRAKASFVIEGLKEADKDEFCRCELKLQKWYGDLRGKPFAIEAENSILDISGFSKQYNCAFIWQKDGVKKLNLYLIINYFKGGKLRFKKIKPEAFEANRFYTVINKKSGEIVPMEVNFNFDDPNLIILPLAFGKRQGREFIWNDLLSLETGSLKLANGRVIEKTLYNRRTRQDEPALFVALTFERREVLDSSNIKPMNLIGVDRGENIPAVIALTDPEGCPLSRFKDSLGNPTHILRIGESYKEKQRTIQAKKEVEQRRAGGYSRKYASKAKNLADDMVRNTARDLLYYAVTQDAMLIFENLSRGFGRQGKRTFMAERQYTRMEDWLTAKLAYEGLPSKTYLSKTLAQYTSKTCSNCGFTITSADYDRVLEKLKKTATGWMTTINGKELKVEGQITYYNRYKRQNVVKDLSVELDRLSEESVNNDISSWTKGRSGEALSLLKKRFSHRPVQEKFVCLNCGFETHADEQAALNIARSWLFLRSQEYKKYQTNKTTGNTDKRAFVETWQSFYRKKLKEVWKPAV

SEQ ID NO: 883 - protein, 978 aa, Artificial Sequence
  CasX Variant
QEIKRINKIRRRLVKDSNTKKAGKTGPMKTLLVRVMTPDLRERLENLRKKPENIPQPISNTSRANLNKLLTDYTEMKKAILHVYWEEFQKDPVGLMSRVAQPASKKIDQNKLKPEMDEKGNLTTAGFACSQCGQPLFVYKLEQVSEKGKAYTNYFGRCNVAEHEKLILLAQLKPEKDSDEAVTYSLGKFGQRALDFYSIHVTKESTHPVKPLAQIAGNRYMSGPVGKALSDACMGTIASFLSKYQDIIIEHQKVVKGNQKRLESLRELAGKENLEYPSVTLPPQPHTKEGVDAYNEVIARVRMWVNLNLWQKLKLSRDDAKPLLRLKGFPSFPLVERQANEVDWWDMVCNVKKLINEKKEDGKVFWQNLAGYKRQEALRPYLSSEEDRKKGKKFARYQLGDLLLHLEKKHGEDWGKVYDEAWERIDKKVEGLSKHIKLEEERRSEDAQSKAALTDWLRAKASFVIEGLKEADKDEFCRCELKLQKWYGDLRGKPFAIEAENSILDISGFSKQYNCAFIWQKDGVKKLNLYLIINYFKGGKLRFKKIKPEAFEANRFYTVINKKSGEIVPMEVNFNFDDPNLIILPLAFGKRQGREFIWNDLLSLETGSLKLANGRVIEKTLYNRRTRQDEPALFVALTFERREVLDSSNIKPMNLIGVDRGENIPAVIALTDPEGCPLSRFKDSLGNPTHILRIGESYKEKQRTIQAKKEVEQRRAGGYSRKYASKAKNLADDMVRNTARDLLYYAVTQDAMLIFENLSRGFGRQGKRTFMAERQYTRMEDWLTAKLAYEGLPSKTYLSKTLAQYTSKTCSNCGFTITSADYDRVLEKLKKTATGWMTTINGKELKVEGQITYYNRYKRQNVVKDLSVELDRLSEESVNNDISSWTKGRSGEALSLLKKRFSHRPVQEKFVCLNCGFETHADEQAALNIARSWLFLRSQEYKKYQTNKTTGNTDKRAFVETWQSFYRKKLKEVWKPAV

SEQ ID NO: 884 - protein, 978 aa, Artificial Sequence
  CasX Variant
QEIKRINKIRRRLVKDSNTKKAGKTGPMKTLLVRVMTPDLRERLENLRKKPENIPQPISNTSRANLNKLLTDYTEMKKAILHVYWEEFQKDPVGLMSRVAQPASKKIDQNKLKPEMDEKGNLTTAGFACSQCGQPLFVYKLEQVSEKGKAYTNYFGRCNVAEHEKLILLAQLKPEKDSDEAVTYSLGKFGQRALDFYSIHVTKESTHPVKPLAQIAGNRYASGPVGKALSDACMGTIASFLSKYQDIIIEHQKVVKGNQKRLESLRELAGKENLEYPSVTLPPQPHTKEGVDAYNEVIARVRMWVNLNLWQKLKLSRDDAKPLLRLKGFPSFPLVERQANEVDWWDMVCNVKKLINEKKEDGKVFWQNLAIYKRQEALRPYLSSEEDRKKGKKFARYQLGDLLLHLEKKHGEDWGKVYDEAWERIDKKVEGLSKHIKLEEERRSEDAQSKAALTDWLRAKASFVIEGLKEADKDEFCRCELKLQKWYGDLRGKPFAIEAENSILDISGFSKQYNCAFIWQKDGVKKLNLYLIINYFKGGKLRFKKIKPEAFEANRFYTVINKKSGEIVPMEVNFNFDDPNLIILPLAFGKRQGREFIWNDLLSLETGSLKLANGRVIEKTLYNRRTRQDEPALFVALTFERREVLDSSNIKPMNLIGVDRGENIPAVIALTDPEGCPLSRFKDSLGNPTHILRIGESYKEKQRTIQAKKEVEQRRAGGYSRKYASKAKNLADDMVRNTARDLLYYAVTQDAMLIFENLSRGFGRQGKRTFMAERQYTRMEDWLTAKLAYEGLPSKTYLSKTLAQYTSKTCSNCGFTITSADYDRVLEKLKKTATGWMTTINGKELKVEGQITYYNRYKRQNVVKDLSVELDRLSEESVNNDISSWTKGRSGEALSLLKKRFSHRPVQEKFVCLNCGFETHADEQAALNIARSWLFLRSQEYKKYQTNKTTGNTDKRAFVETWQSFYRKKLKEVWKPAV

SEQ ID NO: 885 - protein, 979 aa, Artificial Sequence
  CasX Variant
QEIKRINKIRRRLVKDSNTKKAGKTGPMKTLLVRVMTPDLRERLENLRKKPENIPQPISNTSRANLNKLLTDYTEMKKAILHVYWEEFQKDPVGLMSRVAQPASKKIDQNKLKPEMDEKGNLTTAGFACSQCGQPLFVYKLEQVSEKGKAYTNYFGRCNVAEHEKLILLAQLKPEKDSDEAVTYSLGKFGQRALDFYSIHVTKESTHPVKPLAQIAGNRYASGPVGKALSDACMGTIASFLSKYQDIIIEHQKVVKGNQKRLESLRELAGKENLEYPSVTLPPQPHTKEGVDAYNEVIARVRMWVNLNLWQKLKLSRDDAKPLLRLKGFPSFPLVERQANEVDWWDMVCNVKKLINEKKEDGKVFWQNLAGYKRQEALRPYLSSEEDVRKKGKKFARYQLGDLLLHLEKKHGEDWGKVYDEAWERIDKKVEGLSKHIKLEEERRSEDAQSKAALTDWLRAKASFVIEGLKEADKDEFCRCELKLQKWYGDLRGKPFAIEAENSILDISGFSKQYNCAFIWQKDGVKKLNLYLIINYFKGGKLRFKKIKPEAFEANRFYTVINKKSGEIVPMEVNFNFDDPNLIILPLAFGKRQGREFIWNDLLSLETGSLKLANGRVIEKTLYNRRTRQDEPALFVALTFERREVLDSSNIKPMNLIGVDRGENIPAVIALTDPEGCPLSRFKDSLGNPTHILRIGESYKEKQRTIQAKKEVEQRRAGGYSRKYASKAKNLADDMVRNTARDLLYYAVTQDAMLIFENLSRGFGRQGKRTFMAERQYTRMEDWLTAKLAYEGLPSKTYLSKTLAQYTSKTCSNCGFTITSADYDRVLEKLKKTATGWMTTINGKELKVEGQITYYNRYKRQNVVKDLSVELDRLSEESVNNDISSWTKGRSGEALSLLKKRFSHRPVQEKFVCLNCGFETHADEQAALNIARSWLFLRSQEYKKYQTNKTTGNTDKRAFVETWQSFYRKKLKEVWKPAV

SEQ ID NO: 886 - protein, 978 aa, Artificial Sequence
  CasX Variant
QEIKRINKIRRRLVKDSNTKKAGKTGPMKTLLVRVMTPDLRERLENLRKKPENIPQPISNTSRANLNKLLTDYTEMKKAILHVYWEEFQKDPVGLMSRVAQPASKKIDQNKLKPEMDEKGNLTTAGFACSQCGQPLFVYKLEQVSEKGKAYTNYFGRCNVAEHEKLILLAQLKPEKDSDEAVTYSLGKFGQRALDFYSIHVTKESTHPVKPLAQIAGNRYASGPVGKALSDACMGTIASFLSKYQDIIIEHQKVVKGNQKRLESLRELAGKENLEYPSVTLPPQPHTKEGVDAYNEVIARVRMWVNLNLWQKLKLSRDDAKPLLRLKGFPSFPLVERQANEVDWWDMVCNVKKLINEKKEDGKVFWQNLAGYKRQEALRPYLSSEEDREKGKKFARYQLGDLLLHLEKKHGEDWGKVYDEAWERIDKKVEGLSKHIKLEEERRSEDAQSKAALTDWLRAKASFVIEGLKEADKDEFCRCELKLQKWYGDLRGKPFAIEAENSILDISGFSKQYNCAFIWQKDGVKKLNLYLIINYFKGGKLRFKKIKPEAFEANRFYTVINKKSGEIVPMEVNFNFDDPNLIILPLAFGKRQGREFIWNDLLSLETGSLKLANGRVIEKTLYNRRTRQDEPALFVALTFERREVLDSSNIKPMNLIGVDRGENIPAVIALTDPEGCPLSRFKDSLGNPTHILRIGESYKEKQRTIQAKKEVEQRRAGGYSRKYASKAKNLADDMVRNTARDLLYYAVTQDAMLIFENLSRGFGRQGKRTFMAERQYTRMEDWLTAKLAYEGLPSKTYLSKTLAQYTSKTCSNCGFTITSADYDRVLEKLKKTATGWMTTINGKELKVEGQITYYNRYKRQNVVKDLSVELDRLSEESVNNDISSWTKGRSGEALSLLKKRFSHRPVQEKFVCLNCGFETHADEQAALNIARSWLFLRSQEYKKYQTNKTTGNTDKRAFVETWQSFYRKKLKEVWKPAV

SEQ ID NO: 887 - protein, 979 aa, Artificial Sequence
  CasX Variant
QEIKRINKIRRRLVKDSNTKKAGKTGPMKTLLVRVMTPDLRERLENLRKKPENIPQPISNTSRANLNKLLTDYTEMKKAILHVYWEEFQKDPVGLMSRVAQPASKKIDQNKLKPEMDEKGNLTTAGFACSQCGQPLFVYKLEQVSEKGKAYTNYFGRCNVAEHEKLILLAQLKPEKDSDEAVTYSLGKFGQRALDFYSIHVTKESTHPVKPLAQIAGNRYASGPVGKALSDACMGTIASFLSKYQDIIIEHQKVVKGNQKRLESLRELAGKENLEYPSVTLPPQPHTKEGVDAYNEVIARVRMWVNLNLWQKLKLSRDDAKPLLRLKGFPSFPLVERQANEVDWWDMVCNVKKLINEKKEDGKVFWQNLAGYKRQEALRPYLSSEEDRKKGKKFARYQLGDLLLHLEKKHGEDWGKVYDEAWERIDKKVEGLSKHIKLEEERRSEDAQSKAALTDWLRAKASFVIEGLKEADKDEMFCRCELKLQKWYGDLRGKPFAIEAENSILDISGFSKQYNCAFIWQKDGVKKLNLYLIINYFKGGKLRFKKIKPEAFEANRFYTVINKKSGEIVPMEVNFNFDDPNLIILPLAFGKRQGREFIWNDLLSLETGSLKLANGRVIEKTLYNRRTRQDEPALFVALTFERREVLDSSNIKPMNLIGVDRGENIPAVIALTDPEGCPLSRFKDSLGNPTHILRIGESYKEKQRTIQAKKEVEQRRAGGYSRKYASKAKNLADDMVRNTARDLLYYAVTQDAMLIFENLSRGFGRQGKRTFMAERQYTRMEDWLTAKLAYEGLPSKTYLSKTLAQYTSKTCSNCGFTITSADYDRVLEKLKKTATGWMTTINGKELKVEGQITYYNRYKRQNVVKDLSVELDRLSEESVNNDISSWTKGRSGEALSLLKKRFSHRPVQEKFVCLNCGFETHADEQAALNIARSWLFLRSQEYKKYQTNKTTGNTDKRAFVETWQSFYRKKLKEVWKPAV

SEQ ID NO: 888 - protein, 978 aa, Artificial Sequence
  CasX Variant
QEIKRINKIRRRLVKDSNTKKAGKTGPMKTLLVRVMTPDLRERLENLRKKPENIPQPISNTSRANLNKLLTDYTEMKKAILHVYWEEFQKDPVGLMSRVAQPASKKIDQNKLKPEMDEKGNLTTAGFACSQCGQPLFVYKLEQVSEKGKAYTNYFGRCNVAEHEKLILLAQLKPEKDSDEAVTYSLGKFGQRALDFYSIHVTKESTHPVKPLAQIAGNRYASGPVGKALSDACMGTIASFLSKYQDIIIEHQKVVKGNQKRLESLRELAGKENLEYPSVTLPPQPHTKEGVDAYNEVIARVRMWVNLNLWQKLKLSRDDAKPLLRLKGFPSFPLVERQANEVDWWDMVCNVKKLINEKKEDGKVFWQNLAGYKRQEALRPYLSSEEDRKKGKKFARYQLGDLLLHLEKKHGEDWGKVYDEAWERIDKKVEGLSKHIKLEEERRSEDAQSKAALTDWLRAKASFVIEGLKEADKDEFCRCELKLQKWYGDLRGKPFAIEAENSILDISGFSKQYNCAFIWQKDGVKKQNLYLIINYFKGGKLRFKKIKPEAFEANRFYTVINKKSGEIVPMEVNFNFDDPNLIILPLAFGKRQGREFIWNDLLSLETGSLKLANGRVIEKTLYNRRTRQDEPALFVALTFERREVLDSSNIKPMNLIGVDRGENIPAVIALTDPEGCPLSRFKDSLGNPTHILRIGESYKEKQRTIQAKKEVEQRRAGGYSRKYASKAKNLADDMVRNTARDLLYYAVTQDAMLIFENLSRGFGRQGKRTFMAERQYTRMEDWLTAKLAYEGLPSKTYLSKTLAQYTSKTCSNCGFTITSADYDRVLEKLKKTATGWMTTINGKELKVEGQITYYNRYKRQNVVKDLSVELDRLSEESVNNDISSWTKGRSGEALSLLKKRFSHRPVQEKFVCLNCGFETHADEQAALNIARSWLFLRSQEYKKYQTNKTTGNTDKRAFVETWQSFYRKKLKEVWKPAV

SEQ ID NO: 889 - protein, 978 aa, Artificial Sequence
  CasX Variant
QEIKRINKIRRRLVKDSNTKKAGKTGPMKTLLVRVMTPDLRERLENLRKKPENIPQPISNTSRANLNKLLTDYTEMKKAILHVYWEEFQKDPVGLMSRVAQPASKKIDQNKLKPEMDEKGNLTTAGFACSQCGQPLFVYKLEQVSEKGKAYTNYFGRCNVAEHEKLILLAQLKPEKDSDEAVTYSLGKFGQRALDFYSIHVTKESTHPVKPLAQIAGNRYASGPVGKALSDACMGTIASFLSKYQDIIIEHQKVVKGNQKRLESLRELAGKENLEYPSVTLPPQPHTKEGVDAYNEVIARVRMWVNLNLWQKLKLSRDDAKPLLRLKGFPSFPLVERQANEVDWWDMVCNVKKLINEKKEDGKVFWQNLAGYKRQEALRPYLSSEEDRKKGKKFARYQLGDLLLHLEKKHGEDWGKVYDEAWERIDKKVEGLSKHIKLEEERRSEDAQSKAALTDWLRAKASFVIEGLKEADKDEFCRCELKLQKWYGDLRGKPFAIEAENSILDISGFSKQYNCAFIWQKDGVKKLNLYLIINYFKGGKLRFKKIKPEAFEANRFYTVINKKSGEIVIMEVNFNFDDPNLIILPLAFGKRQGREFIWNDLLSLETGSLKLANGRVIEKTLYNRRTRQDEPALFVALTFERREVLDSSNIKPMNLIGVDRGENIPAVIALTDPEGCPLSRFKDSLGNPTHILRIGESYKEKQRTIQAKKEVEQRRAGGYSRKYASKAKNLADDMVRNTARDLLYYAVTQDAMLIFENLSRGFGRQGKRTFMAERQYTRMEDWLTAKLAYEGLPSKTYLSKTLAQYTSKTCSNCGFTITSADYDRVLEKLKKTATGWMTTINGKELKVEGQITYYNRYKRQNVVKDLSVELDRLSEESVNNDISSWTKGRSGEALSLLKKRFSHRPVQEKFVCLNCGFETHADEQAALNIARSWLFLRSQEYKKYQTNKTTGNTDKRAFVETWQSFYRKKLKEVWKPAV

SEQ ID NO: 890 - protein, 978 aa, Artificial Sequence
  CasX Variant
QEIKRINKIRRRLVKDSNTKKAGKTGPMKTLLVRVMTPDLRERLENLRKKPENIPQPISNTSRANLNKLLTDYTEMKKAILHVYWEEFQKDPVGLMSRVAQPASKKIDQNKLKPEMDEKGNLTTAGFACSQCGQPLFVYKLEQVSEKGKAYTNYFGRCNVAEHEKLILLAQLKPEKDSDEAVTYSLGKFGQRALDFYSIHVTKESTHPVKPLAQIAGNRYASGPVGKALSDACMGTIASFLSKYQDIIIEHQKVVKGNQKRLESLRELAGKENLEYPSVTLPPQPHTKEGVDAYNEVIARVRMWVNLNLWQKLKLSRDDAKPLLRLKGFPSFPLVERQANEVDWWDMVCNVKKLINEKKEDGKVFWQNLAGYKRQEALRPYLSSEEDRKKGKKFARYQLGDLLLHLEKKHGEDWGKVYDEAWERIDKKVEGLSKHIKLEEERRSEDAQSKAALTDWLRAKASFVIEGLKEADKDEFCRCELKLQKWYGDLRGKPFAIEAENSILDISGFSKQYNCAFIWQKDGVKKLNLYLIINYFKGGKLRFKKIKPEAFEANRFYTVINKKSGEIVPMEVNFNFDDPNLIILPLAFGKRQGREFIWNDLLSLETGSLKLANGRVIEKTLYNRRTRQDEPALFVALTFERREVNDSSNIKPMNLIGVDRGENIPAVIALTDPEGCPLSRFKDSLGNPTHILRIGESYKEKQRTIQAKKEVEQRRAGGYSRKYASKAKNLADDMVRNTARDLLYYAVTQDAMLIFENLSRGFGRQGKRTFMAERQYTRMEDWLTAKLAYEGLPSKTYLSKTLAQYTSKTCSNCGFTITSADYDRVLEKLKKTATGWMTTINGKELKVEGQITYYNRYKRQNVVKDLSVELDRLSEESVNNDISSWTKGRSGEALSLLKKRFSHRPVQEKFVCLNCGFETHADEQAALNIARSWLFLRSQEYKKYQTNKTTGNTDKRAFVETWQSFYRKKLKEVWKPAV

SEQ ID NO: 891 - protein, 979 aa, Artificial Sequence
  CasX Variant
QEIKRINKIRRRLVKDSNTKKAGKTGPMKTLLVRVMTPDLRERLENLRKKPENIPQPISNTSRANLNKLLTDYTEMKKAILHVYWEEFQKDPVGLMSRVAQPASKKIDQNKLKPEMDEKGNLTTAGFACSQCGQPLFVYKLEQVSEKGKAYTNYFGRCNVAEHEKLILLAQLKPEKDSDEAVTYSLGKFGQRALDFYSIHVTKESTHPVKPLAQIAGNRYASGPVGKALSDACMGTIASFLSKYQDIIIEHQKVVKGNQKRLESLRELAGKENLEYPSVTLPPQPHTKEGVDAYNEVIARVRMWVNLNLWQKLKLSRDDAKPLLRLKGFPSFPLVERQANEVDWWDMVCNVKKLINEKKEDGKVFWQNLAGYKRQEALRPYLSSEEDRKKGKKFARYQLGDLLLHLEKKHGEDWGKVYDEAWERIDKKVEGLSKHIKLEEERRSEDAQSKAALTDWLRAKASFVIEGLKEADKDEFCRCELKLQKWYGDLRGKPFAIEAENSILDISGFSKQYNCAFIWQKDGVKKLNLYLIINYFKGGKLRFKKIKPEAFEANRFYTVINKKSGEIVPMEVNFNFDDPNLIILPLAFGKRQGREFIWNDLLSLETGSLKLANGRVIEKTLYNRRTRQDEPALFVALTFERREVLDSSNIKPMNLIGVDRGENIPAVIALTDPEGCPLSRFKDSLGNPTHILRIGESYKEKQRTIQAKKEVEQRRAGGYSRKYASKAKNLADDMVRNTARDLLYYAVTQDAMLIFENLSRGFGRQGKRTFMAERQYTRMEDWLTAKLAYEGLPSGKTYLSKTLAQYTSKTCSNCGFTITSADYDRVLEKLKKTATGWMTTINGKELKVEGQITYYNRYKRQNVVKDLSVELDRLSEESVNNDISSWTKGRSGEALSLLKKRFSHRPVQEKFVCLNCGFETHADEQAALNIARSWLFLRSQEYKKYQTNKTTGNTDKRAFVETWQSFYRKKLKEVWKPAV

SEQ ID NO: 892 - protein, 978 aa, Artificial Sequence
  CasX Variant
QEIKRINKIRRRLVKDSNTKKAGKTGPMKTLLVRVMTPDLRERLENLRKKPENIPQPISNTSRANLNKLLTDYTEMKKAILHVYWEEFQKDPVGLMSRVAQPASKKIDQNKLKPEMDEKGNLTTAGFACSQCGQPLFVYKLEQVSEKGKAYTNYFGRCNVAEHEKLILLAQLKPEKDSDEAVTYSLGKFGQRALDFYSIHVTKESTHPVKPLAQIAGNRYASGPVGKALSDACMGTIASFLSKYQDIIIEHQKVVKGNQKRLESLRELAGKENLEYPSVTLPPQPHTKEGVDAYNEVIARVRMWVNLNLWQKLKLSRDDAKPLLRLKGFPSFPLVERQANEVDWWDMVCNVKKLINEKKEDGKVFWQNLAGYKRQEALRPYLSSEEDRKKGKKFARYQLGDLLLHLEKKHGEDWGKVYDEAWERIDKKVEGLSKHIKLEEERRSEDAQSKAALTDWLRAKASFVIEGLKEADKDEFCRCELKLQKWYGDLRGKPFAIEAENSILDISGFSKQYNCAFIWQKDGVKKLNLYLIINYFKGGKLRFKKIKPEAFEANRFYTVINKKSGEIVPMEVNFNFDDPNLIILPLAFGKRQGREFIWNDLLSLETGSLKLANGRVIEKTLYNRRTRQDEPALFVALTFERREVLDSSNIKPMNLIGVDRGENIPAVIALTDPEGCPLSRFKDSLGNPTHILRIGESYKEKQRTIQAKKEVEQRRAGGYSRKYASKAKNLADDMVRNTARDLLYYAVTQDAMLIFENLSRGFGRQGKRTFMAERQYTRMEDWLTAKLAYEGLPSKTYLSKTLAQYTSKTCSNCGFTITSADYDRMLEKLKKTATGWMTTINGKELKVEGQITYYNRYKRQNVVKDLSVELDRLSEESVNNDISSWTKGRSGEALSLLKKRFSHRPVQEKFVCLNCGFETHADEQAALNIARSWLFLRSQEYKKYQTNKTTGNTDKRAFVETWQSFYRKKLKEVWKPAV

SEQ ID NO: 893 - protein, 978 aa, Artificial Sequence
  CasX Variant
QEIKRINKIRRRLVKDSNTKKAGKTGPMKTLLVRVMTPDLRERLENLRKKPENIPQPISNTSRANLNKLLTDYTEMKKAILHVYWEEFQKDPVGLMSRVAQPASKKIDQNKLKPEMDEKGNLTTAGFACSQCGQPLFVYKLEQVSEKGKAYTNYFGRCNVAEHEKLILLAQLKPEKDSDEAVTYSLGKFGQRALDFYSIHVTKESTHPVKPLAQIAGNRYASGPVGKALSDACMGTIASFLSKYQDIIIEHQKVVKGNQKRLESLRELAGKENLEYPSVTLPPQPHTKEGVDAYNEVIARVRMWVNLNLWQKLKLSRDDAKPLLRLKGFPSFPLVERQANEVDWWDMVCNVKKLINEKKEDGKVFWQNLAGYKRQEALRPYLSSEEDRKKGKKFARYQLGDLLLHLEKKHGEDWGKVYDEAWERIDKKVEGLSKHIKLEEERRSEDAQSKAALTDWLRAKASFVIEGLKEADKDEFCRCELKLQKWYGDLRGKPFAIEAENSILDISGFSKQYNCAFIWQKDGVKKLNLYLIINYFKGGKLRFKKIKPEAFEANRFYTVINKKSGEIVPMEVNFNFDDPNLIILPLAFGKRQGREFIWNDLLSLETGSLKLANGRVIEKTLYNRRTRQDEPALFVALTFERREVLDSSNIKPMNLIGVDRGENIPAVIALTDPEGCPLSRFKDSLGNPTHILRIGESYKEKQRTIQAKKEVEQRRAGGYSRKYASKAKNLADDMVRNTARDLLYYAVTQDAMLIFENLSRGFGRQGKRTFMAERQYTRMEDWLTAKLAYEGLPSKTYLSKTLAQYTSKTCSNCGFTITSADYDRVLEKLKKTATGWMTTINGKELKVEGQITYYNRYKRQNVVKDLSVELDRLSEESVNNDISSWTKGRQGEALSLLKKRFSHRPVQEKFVCLNCGFETHADEQAALNIARSWLFLRSQEYKKYQTNKTTGNTDKRAFVETWQSFYRKKLKEVWKPAV

SEQ ID NO: 894 - protein, 978 aa, Artificial Sequence
  CasX Variant
QEIKRINKIRRRLVKDSNTKKAGKTGPMKTLLVRVMTPDLRERLENLRKKPENIPQPISNTSRANLNKLLTDYTEMKKAILHVYWEEFQKDPVGLMSRVAQPASKKIDQNKLKPEMDEKGNLTTAGFACSQCGQPLFVYKLEQVSEKGKAYTNYFGRCNVAEHEKLILLAQLKPEKDSDEAVTYSLGKFGQRALDFYSIHVTKESTHPVKPLAQIAGNRYASGPVGKALSDACMGTIASFLSKYQDIIIEHQKVVKGNQKRLESLRELAGKENLEYPSVTLPPQPHTKEGVDAYNEVIARVRMWVNLNLWQKLKLSRDDAKPLLRLKGFPSFPLVERQANEVDWWDMVCNVKKLINEKKEDGKVFWQNLAGYKRQEALRPYLSSEEDRKKGKKFARYQLGDLLLHLEKKHGEDWGKVYDEAWERIDKKVEGLSKHIKLEEERRSEDAQSKAALTDWLRAKASFVIEGLKEADKDEFCRCELKLQKWYGDLRGKPFAIEAENSILDISGFSKQYNCAFIWQKDGVKKLNLYLIINYFKGGKLRFKKIKPEAFEANRFYTVINKKSGEIVPMEVNFNFDDPNLIILPLAFGKRQGREFIWNDLLSLETGSLKLANGRVIEKTLYNRRTRQDEPALFVALTFERREVLDSSNIKPMNLIGVDRGENIPAVIALTDPEGCPLSRFKDSLGNPTHILRIGESYKEKQRTIQAKKEVEQRRAGGYSRKYASKAKNLADDMVRNTARDLLYYAVTQDAMLIFENLSRGFGRQGKRTFMAERQYTRMEDWLTAKLAYEGLPSKTYLSKTLAQYTSKTCSNCGFTITSADYDRVLEKLKKTATGWMTTINGKELKVEGQITYYNRYKRQNVVKDLSVELDRLSEESVNNDISSWTKGRSGEALSLLKKRFSHRPVQEKFVCLNCEFETHADEQAALNIARSWLFLRSQEYKKYQTNKTTGNTDKRAFVETWQSFYRKKLKEVWKPAV

SEQ ID NO: 895 - protein, 979 aa, Artificial Sequence
  CasX Variant
QEIKRINKIRRRLVKDSNTKKAGKTGPMKTLLVRVMTPDLRERLENLRKKPENIPQPISNTSRANLNKLLTDYTEMKKAILHVYWEEFQKDPVGLMSRVAQPASKKIDQNKLKPEMDEKGNLTTAGFACSQCGQPLFVYKLEQVSEKGKAYTNYFGRCNVAEHEKLILLAQLKPEKDSDEAVTYSLGKFGQRALDFYSIHVTKESTHPVKPLAQIAGNRYASGPVGKALSDACMGTIASFLSKYQDIIIEHQKVVKGNQKRLESLRELAGKENLEYPSVTLPPQPHTKEGVDAYNEVIARVRMWVNLNLWQKLKLSRDDAKPLLRLKGFPSFPLVERQANEVDWWDMVCNVKKLINEKKEDGKVFWQNLAGYKRQEALRPYLSSEEDRKKGKKFARYQLGDLLLHLEKKHGEDWGKVYDEAWERIDKKVEGLSKHIKLEEERRSEDAQSKAALTDWLRAKASFVIEGLKEADKDEFCRCELKLQKWYGDLRGKPFAIEAENSILDISGFSKQYNCAFIWQKDGVKKLNLYLIINYFKGGKLRFKKIKPEAFEANRFYTVINKKSGEIVPMEVNFNFDDPNLIILPLAFGKRQGREFIWNDLLSLETGSLKLANGRVIEKTLYNRRTRQDEPALFVALTFERREVLDSSNIKPMNLIGVDRGENIPAVIALTDPEGCPLSRFKDSLGNPTHILRIGESYKEKQRTIQAKKEVEQRRAGGYSRKYASKAKNLADDMVRNTARDLLYYAVTQDAMLIFENLSRGFGRQGKRTFMAERQYTRMEDWLTAKLAYEGLPSKTYLSKTLAQYTSKTCSNCGFTITSADYDRVLEKLKKTATGWMTTINGKELKVEGQITYYNRYKRQNVVKDLSVELDRLSEESVNNDISSWTKGRSGEALSLLKKRFSHRPVQEKFVCLNCGFETHADEQAALNIARSWLFLRSQEYKKYQTNKTSTGNTDKRAFVETWQSFYRKKLKEVWKPAV

SEQ ID NO: 896 - protein, 979 aa, Artificial Sequence
  CasX Variant
QEIKRINKIRRRLVKDSNTKKAGKTGPMKTLLVRVMTPDLRERLENLRKKPENIPQPISNTSRANLNKLLTDYTEMKKAILHVYWEEFQKDPVGLMSRVAQPASKKIDQNKLKPEMDEKGNLTTAGFACSQCGQPLFVYKLEQVSEKGKAYTNYFGRCNVAEHEKLILLAQLKPEKDSDEAVTYSLGKFGQRALDFYSIHVTKESTHPVKPLAQIAGNRYASGPVGKALSDACMGTIASFLSKYQDIIIEHQKVVKGNQKRLESLRELAGKENLEYPSVTLPPQPHTKEGVDAYNEVIARVRMWVNLNLWQKLKLSRDDAKPLLRLKGFPSFPLVERQANEVDWWDMVCNVKKLINEKKEDGKVFWQNLAGYKRQEALRPYLSSEEDRKKGKKFARYQLGDLLLHLEKKHGEDWGKVYDEAWERIDKKVEGLSKHIKLEEERRSEDAQSKAALTDWLRAKASFVIEGLKEADKDEFCRCELKLQKWYGDLRGKPFAIEAENSILDISGFSKQYNCAFIWQKDGVKKLNLYLIINYFKGGKLRFKKIKPEAFEANRFYTVINKKSGEIVPMEVNFNFDDPNLIILPLAFGKRQGREFIWNDLLSLETGSLKLANGRVIEKTLYNRRTRQDEPALFVALTFERREVLDSSNIKPMNLIGVDRGENIPAVIALTDPEGCPLSRFKDSLGNPTHILRIGESYKEKQRTIQAKKEVEQRRAGGYSRKYASKAKNLADDMVRNTARDLLYYAVTQDAMLIFENLSRGFGRQGKRTFMAERQYTRMEDWLTAKLAYEGLPSKTYLSKTLAQYTSKTCSNCGFTITSADYDRVLEKLKKTATGWMTTINGKELKVEGQITYYNRYKRQNVVKDLSVELDRLSEESVNNDISSWTKGRSGEALSLLKKRFSHRPVQEKFVCLNCGFETHADEQAALNIARSWLFLRSQEYKKYQTNKTTGKNTDKRAFVETWQSFYRKKLKEVWKPAV

SEQ ID NO: 897 - protein, 978 aa, Artificial Sequence
  CasX Variant
QEIKRINKIRRRLVKDSNTKKAGKTGPMKTLLVRVMTPDLRERLENLRKKPENIPQPISNTSRANLNKLLTDYTEMKKAILHVYWEEFQKDPVGLMSRVAGPASKKIDQNKLKPEMDEKGNLTTAGFACSQCGQPLFVYKLEQVSEKGKAYTNYFGRCNVAEHEKLILLAQLKPEKDSDEAVTYSLGKFGQRALDFYSIHVTKESTHPVKPLAQIAGNRYASGPVGKALSDACMGTIASFLSKYQDIIIEHQKVVKGNQKRLESLRELAGKENLEYPSVTLPPQPHTKEGVDAYNEVIARVRMWVNLNLWQKLKLSRDDAKPLLRLKGFPSFPLVERQANEVDWWDMVCNVKKLINEKKEDGKVFWQNLAGYKRQEALRPYLSSEEDRKKGKKFARYQLGDLLLHLEKKHGEDWGKVYDEAWERIDKKVEGLSKHIKLEEERRSEDAQSKAALTDWLRAKASFVIEGLKEADKDEFCRCELKLQKWYGDLRGKPFAIEAENSILDISGFSKQYNCAFIWQKDGVKKLNLYLIINYFKGGKLRFKKIKPEAFEANRFYTVINKKSGEIVPMEVNFNFDDPNLIILPLAFGKRQGREFIWNDLLSLETGSLKLANGRVIEKTLYNRRTRQDEPALFVALTFERREVLDSSNIKPMNLIGVDRGENIPAVIALTDPEGCPLSRFKDSLGNPTHILRIGESYKEKQRTIQAKKEVEQRRAGGYSRKYASKAKNLADDMVRNTARDLLYYAVTQDAMLIFENLSRGFGRQGKRTFMAERQYTRMEDWLTAKLAYEGLPSKTYLSKTLAQYTSKTCSNCGFTITSADYDRVLEKLKKTATGWMTTINGKELKVEGQITYYNRYKRQNVVKDLSVELDRLSEESVNNDISSWTKGRSGEALSLLKKRFSHRPVQEKFVCLNCGFETHADEQAALNIARSWLFLRSQEYKKYQTNKTTGNTDKRAFVETWQSFYRKKLKEVWKPAV

SEQ ID NO: 898 - protein, 978 aa, Artificial Sequence
  CasX Variant
QEIKRINKIRRRLVKDSNTKKAGKTGPMKTLLVRVMTPDLRERLENLRKKPENIPQPISNTSRANLNKLLTDYTEMKKAILHVYWEEFQKDPVGLMSRVAQPISKKIDQNKLKPEMDEKGNLTTAGFACSQCGQPLFVYKLEQVSEKGKAYTNYFGRCNVAEHEKLILLAQLKPEKDSDEAVTYSLGKFGQRALDFYSIHVTKESTHPVKPLAQIAGNRYASGPVGKALSDACMGTIASFLSKYQDIIIEHQKVVKGNQKRLESLRELAGKENLEYPSVTLPPQPHTKEGVDAYNEVIARVRMWVNLNLWQKLKLSRDDAKPLLRLKGFPSFPLVERQANEVDWWDMVCNVKKLINEKKEDGKVFWQNLAGYKRQEALRPYLSSEEDRKKGKKFARYQLGDLLLHLEKKHGEDWGKVYDEAWERIDKKVEGLSKHIKLEEERRSEDAQSKAALTDWLRAKASFVIEGLKEADKDEFCRCELKLQKWYGDLRGKPFAIEAENSILDISGFSKQYNCAFIWQKDGVKKLNLYLIINYFKGGKLRFKKIKPEAFEANRFYTVINKKSGEIVPMEVNFNFDDPNLIILPLAFGKRQGREFIWNDLLSLETGSLKLANGRVIEKTLYNRRTRQDEPALFVALTFERREVLDSSNIKPMNLIGVDRGENIPAVIALTDPEGCPLSRFKDSLGNPTHILRIGESYKEKQRTIQAKKEVEQRRAGGYSRKYASKAKNLADDMVRNTARDLLYYAVTQDAMLIFENLSRGFGRQGKRTFMAERQYTRMEDWLTAKLAYEGLPSKTYLSKTLAQYTSKTCSNCGFTITSADYDRVLEKLKKTATGWMTTINGKELKVEGQITYYNRYKRQNVVKDLSVELDRLSEESVNNDISSWTKGRSGEALSLLKKRFSHRPVQEKFVCLNCGFETHADEQAALNIARSWLFLRSQEYKKYQTNKTTGNTDKRAFVETWQSFYRKKLKEVWKPAV

SEQ ID NO: 899 - protein, 979 aa, Artificial Sequence
  CasX Variant
QEIKRINKIRRRLVKDSNTKKAGKTGPMKTLLVRVMTPDLRERLENLRKKPENIPQPISNTSRANLNKLLTDYTEMKKAILHVYWEEFQKDPVGLMSRVAQPALSKKIDQNKLKPEMDEKGNLTTAGFACSQCGQPLFVYKLEQVSEKGKAYTNYFGRCNVAEHEKLILLAQLKPEKDSDEAVTYSLGKFGQRALDFYSIHVTKESTHPVKPLAQIAGNRYASGPVGKALSDACMGTIASFLSKYQDIIIEHQKVVKGNQKRLESLRELAGKENLEYPSVTLPPQPHTKEGVDAYNEVIARVRMWVNLNLWQKLKLSRDDAKPLLRLKGFPSFPLVERQANEVDWWDMVCNVKKLINEKKEDGKVFWQNLAGYKRQEALRPYLSSEEDRKKGKKFARYQLGDLLLHLEKKHGEDWGKVYDEAWERIDKKVEGLSKHIKLEEERRSEDAQSKAALTDWLRAKASFVIEGLKEADKDEFCRCELKLQKWYGDLRGKPFAIEAENSILDISGFSKQYNCAFIWQKDGVKKLNLYLIINYFKGGKLRFKKIKPEAFEANRFYTVINKKSGEIVPMEVNFNFDDPNLIILPLAFGKRQGREFIWNDLLSLETGSLKLANGRVIEKTLYNRRTRQDEPALFVALTFERREVLDSSNIKPMNLIGVDRGENIPAVIALTDPEGCPLSRFKDSLGNPTHILRIGESYKEKQRTIQAKKEVEQRRAGGYSRKYASKAKNLADDMVRNTARDLLYYAVTQDAMLIFENLSRGFGRQGKRTFMAERQYTRMEDWLTAKLAYEGLPSKTYLSKTLAQYTSKTCSNCGFTITSADYDRVLEKLKKTATGWMTTINGKELKVEGQITYYNRYKRQNVVKDLSVELDRLSEESVNNDISSWTKGRSGEALSLLKKRFSHRPVQEKFVCLNCGFETHADEQAALNIARSWLFLRSQEYKKYQTNKTTGNTDKRAFVETWQSFYRKKLKEVWKPAV

SEQ ID NO: 900 - protein, 978 aa, Artificial Sequence
  CasX Variant
QEIKRINKIRRRLVKDSNTKKAGKTGPMKTLLVRVMTPDLRERLENLRKKPENIPQPISNTSRANLNKLLTDYTEMKKAILHVYWEEFQKDPVGLMSRVAQPASKKIDQNKLKPEMDEKGNLTTAGFACSQCGQPLFVYKLEQVSEKGKAYTNYFGRCNVAEHEKLILLAQLKPEKDSDEAVTYSLGKFGQRALDFYSIHVTKESTHPVKPLAQIAGNRYASGPVGKALSDACMGTIASFLSKYQDIIIEHQKVVKGNQKRLESLRELAGKENLEYPSVTLPPQPHTKEGVDAYNEVIARVRMWVNLNLWQKLKLSRDDAKPLLRLKGFPSFPDVERQANEVDWWDMVCNVKKLINEKKEDGKVFWQNLAGYKRQEALRPYLSSEEDRKKGKKFARYQLGDLLLHLEKKHGEDWGKVYDEAWERIDKKVEGLSKHIKLEEERRSEDAQSKAALTDWLRAKASFVIEGLKEADKDEFCRCELKLQKWYGDLRGKPFAIEAENSILDISGFSKQYNCAFIWQKDGVKKLNLYLIINYFKGGKLRFKKIKPEAFEANRFYTVINKKSGEIVPMEVNFNFDDPNLIILPLAFGKRQGREFIWNDLLSLETGSLKLANGRVIEKTLYNRRTRQDEPALFVALTFERREVLDSSNIKPMNLIGVDRGENIPAVIALTDPEGCPLSRFKDSLGNPTHILRIGESYKEKQRTIQAKKEVEQRRAGGYSRKYASKAKNLADDMVRNTARDLLYYAVTQDAMLIFENLSRGFGRQGKRTFMAERQYTRMEDWLTAKLAYEGLPSKTYLSKTLAQYTSKTCSNCGFTITSADYDRVLEKLKKTATGWMTTINGKELKVEGQITYYNRYKRQNVVKDLSVELDRLSEESVNNDISSWTKGRSGEALSLLKKRFSHRPVQEKFVCLNCGFETHADEQAALNIARSWLFLRSQEYKKYQTNKTTGNTDKRAFVETWQSFYRKKLKEVWKPAV

SEQ ID NO: 901 - protein, 978 aa, Artificial Sequence
  CasX Variant
QEIKRINKIRRRLVKDSNTKKAGKTGPMKTLLVRVMTPDLRERLENLRKKPENIPQPISNTSRANLNKLLTDYTEMKKAILHVYWEEFQKDPVGLMSRVAQPASKKIDQNKLKPEMDEKGNLTTAGFACSQCGQPLFVYKLEQVSEKGKAYTNYFGRCNVAEHEKLILLAQLKPEKDSDEAVTYSLGKFGQRALDFYSIHVTKESTHPVKPLAQIAGNRYASGPVGKALSDACMGTIASFLSKYQDIIIEHQKVVKGNQKRLESLRELAGKENLEYPSVTLPPQPHTKEGVDAYNEVIARVRMWVNLNLWQKLKLSRDDAKPLLRLKGFPSFHLVERQANEVDWWDMVCNVKKLINEKKEDGKVFWQNLAGYKRQEALRPYLSSEEDRKKGKKFARYQLGDLLLHLEKKHGEDWGKVYDEAWERIDKKVEGLSKHIKLEEERRSEDAQSKAALTDWLRAKASFVIEGLKEADKDEFCRCELKLQKWYGDLRGKPFAIEAENSILDISGFSKQYNCAFIWQKDGVKKLNLYLIINYFKGGKLRFKKIKPEAFEANRFYTVINKKSGEIVPMEVNFNFDDPNLIILPLAFGKRQGREFIWNDLLSLETGSLKLANGRVIEKTLYNRRTRQDEPALFVALTFERREVLDSSNIKPMNLIGVDRGENIPAVIALTDPEGCPLSRFKDSLGNPTHILRIGESYKEKQRTIQAKKEVEQRRAGGYSRKYASKAKNLADDMVRNTARDLLYYAVTQDAMLIFENLSRGFGRQGKRTFMAERQYTRMEDWLTAKLAYEGLPSKTYLSKTLAQYTSKTCSNCGFTITSADYDRVLEKLKKTATGWMTTINGKELKVEGQITYYNRYKRQNVVKDLSVELDRLSEESVNNDISSWTKGRSGEALSLLKKRFSHRPVQEKFVCLNCGFETHADEQAALNIARSWLFLRSQEYKKYQTNKTTGNTDKRAFVETWQSFYRKKLKEVWKPAV

SEQ ID NO: 902 - protein, 978 aa, Artificial Sequence
  CasX Variant
QEIKRINKIRRRLVKDSNTKKAGKTGPMKTLLVRVMTPDLRERLENLRKKPENIPQPISNTSRANLNKLLTDYTEMKKAILHVYWEEFQKDPVGLMSRVAQPASKKIDQNKLKPEMDEKGNLTTAGFACSQCGQPLFVYKLEQVSEKGKAYTNYFGRCNVAEHEKLILLAQLKPEKDSDEAVTYSLGKFGQRALDFYSIHVTKESTHPVKPLAQIAGNRYASGPVGKALSDACMGTIASFLSKYQDIIIEHQKVVKGNQKRLESLRELAGKENLEYPSVTLPPQPHTKEGVDAYNEVIARVRMWVNLNLWQKLKLSRDDAKPLLRLKGFPSFPLVERQANEVEQWDMVCNVKKLINEKKEDGKVFWQNLAGYKRQEALRPYLSSEEDRKKGKKFARYQLGDLLLHLEKKHGEDWGKVYDEAWERIDKKVEGLSKHIKLEEERRSEDAQSKAALTDWLRAKASFVIEGLKEADKDEFCRCELKLQKWYGDLRGKPFAIEAENSILDISGFSKQYNCAFIWQKDGVKKLNLYLIINYFKGGKLRFKKIKPEAFEANRFYTVINKKSGEIVPMEVNFNFDDPNLIILPLAFGKRQGREFIWNDLLSLETGSLKLANGRVIEKTLYNRRTRQDEPALFVALTFERREVLDSSNIKPMNLIGVDRGENIPAVIALTDPEGCPLSRFKDSLGNPTHILRIGESYKEKQRTIQAKKEVEQRRAGGYSRKYASKAKNLADDMVRNTARDLLYYAVTQDAMLIFENLSRGFGRQGKRTFMAERQYTRMEDWLTAKLAYEGLPSKTYLSKTLAQYTSKTCSNCGFTITSADYDRVLEKLKKTATGWMTTINGKELKVEGQITYYNRYKRQNVVKDLSVELDRLSEESVNNDISSWTKGRSGEALSLLKKRFSHRPVQEKFVCLNCGFETHADEQAALNIARSWLFLRSQEYKKYQTNKTTGNTDKRAFVETWQSFYRKKLKEVWKPAV

SEQ ID NO: 903 - protein, 978 aa, Artificial Sequence
  CasX Variant
QEIKRINKIRRRLVKDSNTKKAGKTGPMKTLLVRVMTPDLRERLENLRKKPENIPQPISNTSRANLNKLLTDYTEMKKAILHVYWEEFQKDPVGLMSRVAQPASKKIDQNKLKPEMDEKGNLTTAGFACSQCGQPLFVYKLEQVSEKGKAYTNYFGRCNVAEHEKLILLAQLKPEKDSDEAVTYSLGKFGQRALDFYSIHVTKESTHPVKPLAQIAGNRYASGPVGKALSDACMGTIASFLSKYQDIIIEHQKVVKGNQKRLESLRELAGKENLEYPSVTLPPQPHTKEGVDAYNEVIARVRMWVNLNLWQKLKLSRDDAKPLLRLKGFPSFPLPERQANEVDWWDMVCNVKKLINEKKEDGKVFWQNLAGYKRQEALRPYLSSEEDRKKGKKFARYQLGDLLLHLEKKHGEDWGKVYDEAWERIDKKVEGLSKHIKLEEERRSEDAQSKAALTDWLRAKASFVIEGLKEADKDEFCRCELKLQKWYGDLRGKPFAIEAENSILDISGFSKQYNCAFIWQKDGVKKLNLYLIINYFKGGKLRFKKIKPEAFEANRFYTVINKKSGEIVPMEVNFNFDDPNLIILPLAFGKRQGREFIWNDLLSLETGSLKLANGRVIEKTLYNRRTRQDEPALFVALTFERREVLDSSNIKPMNLIGVDRGENIPAVIALTDPEGCPLSRFKDSLGNPTHILRIGESYKEKQRTIQAKKEVEQRRAGGYSRKYASKAKNLADDMVRNTARDLLYYAVTQDAMLIFENLSRGFGRQGKRTFMAERQYTRMEDWLTAKLAYEGLPSKTYLSKTLAQYTSKTCSNCGFTITSADYDRVLEKLKKTATGWMTTINGKELKVEGQITYYNRYKRQNVVKDLSVELDRLSEESVNNDISSWTKGRSGEALSLLKKRFSHRPVQEKFVCLNCGFETHADEQAALNIARSWLFLRSQEYKKYQTNKTTGNTDKRAFVETWQSFYRKKLKEVWKPAV

SEQ ID NO: 904 - protein, 978 aa, Artificial Sequence
  CasX Variant
QEIKRINKIRRRLVKDSNTKKAGKTGPMKTLLVRVMTPDLRERLENLRKKPENIPQPISNTSRANLNKLLTDYTEMKKAILHVYWEEFQKDPVGLMSRVAQPASKKIDQNKLKPEMDEKGNLTTAGFACSQCGQPLFVYKLEQVSEKGKAYTNYFGRCNVAEHEKLIDLAQLKPEKDSDEAVTYSLGKFGQRALDFYSIHVTKESTHPVKPLAQIAGNRYASGPVGKALSDACMGTIASFLSKYQDIIIEHQKVVKGNQKRLESLRELAGKENLEYPSVTLPPQPHTKEGVDAYNEVIARVRMWVNLNLWQKLKLSRDDAKPLLRLKGFPSFPLVERQANEVDWWDMVCNVKKLINEKKEDGKVFWQNLAGYKRQEALRPYLSSEEDRKKGKKFARYQLGDLLLHLEKKHGEDWGKVYDEAWERIDKKVEGLSKHIKLEEERRSEDAQSKAALTDWLRAKASFVIEGLKEADKDEFCRCELKLQKWYGDLRGKPFAIEAENSILDISGFSKQYNCAFIWQKDGVKKLNLYLIINYFKGGKLRFKKIKPEAFEANRFYTVINKKSGEIVPMEVNFNFDDPNLIILPLAFGKRQGREFIWNDLLSLETGSLKLANGRVIEKTLYNRRTRQDEPALFVALTFERREVLDSSNIKPMNLIGVDRGENIPAVIALTDPEGCPLSRFKDSLGNPTHILRIGESYKEKQRTIQAKKEVEQRRAGGYSRKYASKAKNLADDMVRNTARDLLYYAVTQDAMLIFENLSRGFGRQGKRTFMAERQYTRMEDWLTAKLAYEGLPSKTYLSKTLAQYTSKTCSNCGFTITSADYDRVLEKLKKTATGWMTTINGKELKVEGQITYYNRYKRQNVVKDLSVELDRLSEESVNNDISSWTKGRSGEALSLLKKRFSHRPVQEKFVCLNCGFETHADEQAALNIARSWLFLRSQEYKKYQTNKTTGNTDKRAFVETWQSFYRKKLKEVWKPAV

SEQ ID NO: 905 - protein, 978 aa, Artificial Sequence
  CasX Variant
QEIKRINKIRRRLVKDSNTKKAGKTGPMKTLLVRVMTPDLRERLENLRKKPENIPQPISNTSRANLNKLLTDYTEMKKAILHVYWEEFQKDPVGLMSRVAQPASKKIDQNKLKPEMDEKGNLTTAGFACSQCGQPLFVYKLEQVSEKGKAYTNYFGRCNVAEHEKLIELAQLKPEKDSDEAVTYSLGKFGQRALDFYSIHVTKESTHPVKPLAQIAGNRYASGPVGKALSDACMGTIASFLSKYQDIIIEHQKVVKGNQKRLESLRELAGKENLEYPSVTLPPQPHTKEGVDAYNEVIARVRMWVNLNLWQKLKLSRDDAKPLLRLKGFPSFPLVERQANEVDWWDMVCNVKKLINEKKEDGKVFWQNLAGYKRQEALRPYLSSEEDRKKGKKFARYQLGDLLLHLEKKHGEDWGKVYDEAWERIDKKVEGLSKHIKLEEERRSEDAQSKAALTDWLRAKASFVIEGLKEADKDEFCRCELKLQKWYGDLRGKPFAIEAENSILDISGFSKQYNCAFIWQKDGVKKLNLYLIINYFKGGKLRFKKIKPEAFEANRFYTVINKKSGEIVPMEVNFNFDDPNLIILPLAFGKRQGREFIWNDLLSLETGSLKLANGRVIEKTLYNRRTRQDEPALFVALTFERREVLDSSNIKPMNLIGVDRGENIPAVIALTDPEGCPLSRFKDSLGNPTHILRIGESYKEKQRTIQAKKEVEQRRAGGYSRKYASKAKNLADDMVRNTARDLLYYAVTQDAMLIFENLSRGFGRQGKRTFMAERQYTRMEDWLTAKLAYEGLPSKTYLSKTLAQYTSKTCSNCGFTITSADYDRVLEKLKKTATGWMTTINGKELKVEGQITYYNRYKRQNVVKDLSVELDRLSEESVNNDISSWTKGRSGEALSLLKKRFSHRPVQEKFVCLNCGFETHADEQAALNIARSWLFLRSQEYKKYQTNKTTGNTDKRAFVETWQSFYRKKLKEVWKPAV

SEQ ID NO: 906 - protein, 978 aa, Artificial Sequence
  CasX Variant
QEIKRINKIRRRLVKDSNTKKAGKTPPMKTLLVRVMTPDLRERLENLRKKPENIPQPISNTSRANLNKLLTDYTEMKKAILHVYWEEFQKDPVGLMSRVAQPASKKIDQNKLKPEMDEKGNLTTAGFACSQCGQPLFVYKLEQVSEKGKAYTNYFGRCNVAEHEKLILLAQLKPEKDSDEAVTYSLGKFGQRALDFYSIHVTKESTHPVKPLAQIAGNRYASGPVGKALSDACMGTIASFLSKYQDIIIEHQKVVKGNQKRLESLRELAGKENLEYPSVTLPPQPHTKEGVDAYNEVIARVRMWVNLNLWQKLKLSRDDAKPLLRLKGFPSFPLVERQANEVDWWDMVCNVKKLINEKKEDGKVFWQNLAGYKRQEALRPYLSSEEDRKKGKKFARYQLGDLLLHLEKKHGEDWGKVYDEAWERIDKKVEGLSKHIKLEEERRSEDAQSKAALTDWLRAKASFVIEGLKEADKDEFCRCELKLQKWYGDLRGKPFAIEAENSILDISGFSKQYNCAFIWQKDGVKKLNLYLIINYFKGGKLRFKKIKPEAFEANRFYTVINKKSGEIVPMEVNFNFDDPNLIILPLAFGKRQGREFIWNDLLSLETGSLKLANGRVIEKTLYNRRTRQDEPALFVALTFERREVLDSSNIKPMNLIGVDRGENIPAVIALTDPEGCPLSRFKDSLGNPTHILRIGESYKEKQRTIQAKKEVEQRRAGGYSRKYASKAKNLADDMVRNTARDLLYYAVTQDAMLIFENLSRGFGRQGKRTFMAERQYTRMEDWLTAKLAYEGLPSKTYLSKTLAQYTSKTCSNCGFTITSADYDRVLEKLKKTATGWMTTINGKELKVEGQITYYNRYKRQNVVKDLSVELDRLSEESVNNDISSWTKGRSGEALSLLKKRFSHRPVQEKFVCLNCGFETHADEQAALNIARSWLFLRSQEYKKYQTNKTTGNTDKRAFVETWQSFYRKKLKEVWKPAV

SEQ ID NO: 907 - protein, 978 aa, Artificial Sequence
  CasX Variant
QEIKRINKIRRRLVKDSNTKKAGKTGPPKTLLVRVMTPDLRERLENLRKKPENIPQPISNTSRANLNKLLTDYTEMKKAILHVYWEEFQKDPVGLMSRVAQPASKKIDQNKLKPEMDEKGNLTTAGFACSQCGQPLFVYKLEQVSEKGKAYTNYFGRCNVAEHEKLILLAQLKPEKDSDEAVTYSLGKFGQRALDFYSIHVTKESTHPVKPLAQIAGNRYASGPVGKALSDACMGTIASFLSKYQDIIIEHQKVVKGNQKRLESLRELAGKENLEYPSVTLPPQPHTKEGVDAYNEVIARVRMWVNLNLWQKLKLSRDDAKPLLRLKGFPSFPLVERQANEVDWWDMVCNVKKLINEKKEDGKVFWQNLAGYKRQEALRPYLSSEEDRKKGKKFARYQLGDLLLHLEKKHGEDWGKVYDEAWERIDKKVEGLSKHIKLEEERRSEDAQSKAALTDWLRAKASFVIEGLKEADKDEFCRCELKLQKWYGDLRGKPFAIEAENSILDISGFSKQYNCAFIWQKDGVKKLNLYLIINYFKGGKLRFKKIKPEAFEANRFYTVINKKSGEIVPMEVNFNFDDPNLIILPLAFGKRQGREFIWNDLLSLETGSLKLANGRVIEKTLYNRRTRQDEPALFVALTFERREVLDSSNIKPMNLIGVDRGENIPAVIALTDPEGCPLSRFKDSLGNPTHILRIGESYKEKQRTIQAKKEVEQRRAGGYSRKYASKAKNLADDMVRNTARDLLYYAVTQDAMLIFENLSRGFGRQGKRTFMAERQYTRMEDWLTAKLAYEGLPSKTYLSKTLAQYTSKTCSNCGFTITSADYDRVLEKLKKTATGWMTTINGKELKVEGQITYYNRYKRQNVVKDLSVELDRLSEESVNNDISSWTKGRSGEALSLLKKRFSHRPVQEKFVCLNCGFETHADEQAALNIARSWLFLRSQEYKKYQTNKTTGNTDKRAFVETWQSFYRKKLKEVWKPAV

SEQ ID NO: 908 - protein, 977 aa, Artificial Sequence; identical to SEQ ID NO: 705
  CasX Variant

SEQ ID NO: 909 - protein, 977 aa, Artificial Sequence
  CasX Variant
QEIKRINKIRRRLVKDSNTKKAGKTGPMKTLLVRVMTPDLRERLENLRKKPENIPQPISNTSRANLNKLLTDYTEMKKAILHVYWEEFQKDPVGLMSRVAQPASKKIDQNKLKPEMDEKGNLTTAGFACQCGQPLFVYKLEQVSEKGKAYTNYFGRCNVAEHEKLILLAQLKPEKDSDEAVTYSLGKFGQRALDFYSIHVTKESTHPVKPLAQIAGNRYASGPVGKALSDACMGTIASFLSKYQDIIIEHQKVVKGNQKRLESLRELAGKENLEYPSVTLPPQPHTKEGVDAYNEVIARVRMWVNLNLWQKLKLSRDDAKPLLRLKGFPSFPLVERQANEVDWWDMVCNVKKLINEKKEDGKVFWQNLAGYKRQEALRPYLSSEEDRKKGKKFARYQLGDLLLHLEKKHGEDWGKVYDEAWERIDKKVEGLSKHIKLEEERRSEDAQSKAALTDWLRAKASFVIEGLKEADKDEFCRCELKLQKWYGDLRGKPFAIEAENSILDISGFSKQYNCAFIWQKDGVKKLNLYLIINYFKGGKLRFKKIKPEAFEANRFYTVINKKSGEIVPMEVNFNFDDPNLIILPLAFGKRQGREFIWNDLLSLETGSLKLANGRVIEKTLYNRRTRQDEPALFVALTFERREVLDSSNIKPMNLIGVDRGENIPAVIALTDPEGCPLSRFKDSLGNPTHILRIGESYKEKQRTIQAKKEVEQRRAGGYSRKYASKAKNLADDMVRNTARDLLYYAVTQDAMLIFENLSRGFGRQGKRTFMAERQYTRMEDWLTAKLAYEGLPSKTYLSKTLAQYTSKTCSNCGFTITSADYDRVLEKLKKTATGWMTTINGKELKVEGQITYYNRYKRQNVVKDLSVELDRLSEESVNNDISSWTKGRSGEALSLLKKRFSHRPVQEKFVCLNCGFETHADEQAALNIARSWLFLRSQEYKKYQTNKTTGNTDKRAFVETWQSFYRKKLKEVWKPAV

SEQ ID NO: 910 - protein, 978 aa, Artificial Sequence
  CasX Variant
QEIKRINKIRRRLVKDSNTKKAGKTGPMKTLLVRVMTPDLRERLENLRKKPENIPQPISNTSRANLNKLLTDYTEMKKAILHVYWEEFQKDPVGLMSRVAQPASKKIDQNKLKPEMDEKGNLTTAGFACSQCGQPLFVYKLEQVSEKGKAYTNYFGRCNVAEHEKLILLAQLKPEKDSDEAVTYSLGKFGQRALDFYSIHVTKESTHPVKPLAQIAGNRYASGPVGKALSDACMGTIASFLSKYHDIIIEHQKVVKGNQKRLESLRELAGKENLEYPSVTLPPQPHTKEGVDAYNEVIARVRMWVNLNLWQKLKLSRDDAKPLLRLKGFPSFPLVERQANEVDWWDMVCNVKKLINEKKEDGKVFWQNLAGYKRQEALRPYLSSEEDRKKGKKFARYQLGDLLLHLEKKHGEDWGKVYDEAWERIDKKVEGLSKHIKLEEERRSEDAQSKAALTDWLRAKASFVIEGLKEADKDEFCRCELKLQKWYGDLRGKPFAIEAENSILDISGFSKQYNCAFIWQKDGVKKLNLYLIINYFKGGKLRFKKIKPEAFEANRFYTVINKKSGEIVPMEVNFNFDDPNLIILPLAFGKRQGREFIWNDLLSLETGSLKLANGRVIEKTLYNRRTRQDEPALFVALTFERREVLDSSNIKPMNLIGVDRGENIPAVIALTDPEGCPLSRFKDSLGNPTHILRIGESYKEKQRTIQAKKEVEQRRAGGYSRKYASKAKNLADDMVRNTARDLLYYAVTQDAMLIFENLSRGFGRQGKRTFMAERQYTRMEDWLTAKLAYEGLPSKTYLSKTLAQYTSKTCSNCGFTITSADYDRVLEKLKKTATGWMTTINGKELKVEGQITYYNRYKRQNVVKDLSVELDRLSEESVNNDISSWTKGRSGEALSLLKKRFSHRPVQEKFVCLNCGFETHADEQAALNIARSWLFLRSQEYKKYQTNKTTGNTDKRAFVETWQSFYRKKLKEVWKPAV

SEQ ID NO: 911 - protein, 978 aa, Artificial Sequence
  CasX Variant
QEIKRINKIRRRLVKDSNTKKAGKTGPMKTLLVRVMTPDLRERLENLRKKPENIPQPISNTSRANLNKLLTDYTEMKKAILHVYWEEFQKDPVGLMSRVAQPASKKIDQNKLKPEMDEKGNLTTAGFACSQCGQPLFVYKLEQVSEKGKAYTNYFGRCNVAEHEKLILLAQLKPEKDSDEAVTYSLGKFGQRALDFYSIHVTKESTHPVKPLAQIAGNRYASGPVGKALSDACMGTIAHFLSKYQDIIIEHQKVVKGNQKRLESLRELAGKENLEYPSVTLPPQPHTKEGVDAYNEVIARVRMWVNLNLWQKLKLSRDDAKPLLRLKGFPSFPLVERQANEVDWWDMVCNVKKLINEKKEDGKVFWQNLAGYKRQEALRPYLSSEEDRKKGKKFARYQLGDLLLHLEKKHGEDWGKVYDEAWERIDKKVEGLSKHIKLEEERRSEDAQSKAALTDWLRAKASFVIEGLKEADKDEFCRCELKLQKWYGDLRGKPFAIEAENSILDISGFSKQYNCAFIWQKDGVKKLNLYLIINYFKGGKLRFKKIKPEAFEANRFYTVINKKSGEIVPMEVNFNFDDPNLIILPLAFGKRQGREFIWNDLLSLETGSLKLANGRVIEKTLYNRRTRQDEPALFVALTFERREVLDSSNIKPMNLIGVDRGENIPAVIALTDPEGCPLSRFKDSLGNPTHILRIGESYKEKQRTIQAKKEVEQRRAGGYSRKYASKAKNLADDMVRNTARDLLYYAVTQDAMLIFENLSRGFGRQGKRTFMAERQYTRMEDWLTAKLAYEGLPSKTYLSKTLAQYTSKTCSNCGFTITSADYDRVLEKLKKTATGWMTTINGKELKVEGQITYYNRYKRQNVVKDLSVELDRLSEESVNNDISSWTKGRSGEALSLLKKRFSHRPVQEKFVCLNCGFETHADEQAALNIARSWLFLRSQEYKKYQTNKTTGNTDKRAFVETWQSFYRKKLKEVWKPAV

SEQ ID NO: 912 - protein, 978 aa, Artificial Sequence
  CasX Variant
QEIKRINKIRRRLVKDSNTKKAGKTGPMKTLLVRVMTPDLRERLENLRKKPENIPQPISNTSRANLNKLLTDYTEMKKAILHVYWEEFQKDPVGLMSRVAQPASKKIDQNKLKPEMDEKGNLTTAGFACSQCGQPLFVYKLEQVSEKGKAYTNYFGRCNVAEHEKLILLAQLKPEKDSDEAVTYSLGKFGQRALDFYSIHVTKESTHPVKPLAQIAGNRYASGPVGKALSDACMGTIATFLSKYQDIIIEHQKVVKGNQKRLESLRELAGKENLEYPSVTLPPQPHTKEGVDAYNEVIARVRMWVNLNLWQKLKLSRDDAKPLLRLKGFPSFPLVERQANEVDWWDMVCNVKKLINEKKEDGKVFWQNLAGYKRQEALRPYLSSEEDRKKGKKFARYQLGDLLLHLEKKHGEDWGKVYDEAWERIDKKVEGLSKHIKLEEERRSEDAQSKAALTDWLRAKASFVIEGLKEADKDEFCRCELKLQKWYGDLRGKPFAIEAENSILDISGFSKQYNCAFIWQKDGVKKLNLYLIINYFKGGKLRFKKIKPEAFEANRFYTVINKKSGEIVPMEVNFNFDDPNLIILPLAFGKRQGREFIWNDLLSLETGSLKLANGRVIEKTLYNRRTRQDEPALFVALTFERREVLDSSNIKPMNLIGVDRGENIPAVIALTDPEGCPLSRFKDSLGNPTHILRIGESYKEKQRTIQAKKEVEQRRAGGYSRKYASKAKNLADDMVRNTARDLLYYAVTQDAMLIFENLSRGFGRQGKRTFMAERQYTRMEDWLTAKLAYEGLPSKTYLSKTLAQYTSKTCSNCGFTITSADYDRVLEKLKKTATGWMTTINGKELKVEGQITYYNRYKRQNVVKDLSVELDRLSEESVNNDISSWTKGRSGEALSLLKKRFSHRPVQEKFVCLNCGFETHADEQAALNIARSWLFLRSQEYKKYQTNKTTGNTDKRAFVETWQSFYRKKLKEVWKPAV

SEQ ID NO: 913 - protein, 978 aa, Artificial Sequence
  CasX Variant
QEIKRINKIRRRLVKDSNTKKAGKTGPMKTLLVRVMTPDLRERLENLRKKPENIPQPISNTSRANLNKLLTDYTEMKKAILHVYWEEFQKDPVGLMSRVAQPASKKIDQNKLKPEMDEKGNLTTAGFACSQCGQPLFVYKLEQVSEKGKAYTNYFGRCNVAEHEKLILLAQLKPEKDSDEAVTYSLGKFGQRALDFYSIHVTKESTHPVKPLAQIAGNRYASGPVGKALSDACMGTIASFLSKYQDIIIEHQKVVKGNQKRLESLRELAGKENLEYPSVTLPPQPHTDEGVDAYNEVIARVRMWVNLNLWQKLKLSRDDAKPLLRLKGFPSFPLVERQANEVDWWDMVCNVKKLINEKKEDGKVFWQNLAGYKRQEALRPYLSSEEDRKKGKKFARYQLGDLLLHLEKKHGEDWGKVYDEAWERIDKKVEGLSKHIKLEEERRSEDAQSKAALTDWLRAKASFVIEGLKEADKDEFCRCELKLQKWYGDLRGKPFAIEAENSILDISGFSKQYNCAFIWQKDGVKKLNLYLIINYFKGGKLRFKKIKPEAFEANRFYTVINKKSGEIVPMEVNFNFDDPNLIILPLAFGKRQGREFIWNDLLSLETGSLKLANGRVIEKTLYNRRTRQDEPALFVALTFERREVLDSSNIKPMNLIGVDRGENIPAVIALTDPEGCPLSRFKDSLGNPTHILRIGESYKEKQRTIQAKKEVEQRRAGGYSRKYASKAKNLADDMVRNTARDLLYYAVTQDAMLIFENLSRGFGRQGKRTFMAERQYTRMEDWLTAKLAYEGLPSKTYLSKTLAQYTSKTCSNCGFTITSADYDRVLEKLKKTATGWMTTINGKELKVEGQITYYNRYKRQNVVKDLSVELDRLSEESVNNDISSWTKGRSGEALSLLKKRFSHRPVQEKFVCLNCGFETHADEQAALNIARSWLFLRSQEYKKYQTNKTTGNTDKRAFVETWQSFYRKKLKEVWKPAV

SEQ ID NO: 914 - protein, 978 aa, Artificial Sequence
  CasX Variant
QEIKRINKIRRRLVKDSNTKKAGKTGPMKTLLVRVMTPDLRERLENLRKKPENIPQPISNTSRANLNKLLTDYTEMKKAILHVYWEEFQKDPVGLMSRVAQPASKKIDQNKLKPEMDEKGNLTTAGFACSQCGQPLFVYKLEQVSEKGKAYTNYFGRCNVAEHEKLILLAQLKPEKDSDEAVTYSLGKFGQRALDFYSIHVTKESTHPVKPLAQIAGNRYASGPVGKALSDACMGTIASFLSKYQDIIIEHQKVVKGNQKRLESLRELAGKENLEYPSVTLPPQPHTEEGVDAYNEVIARVRMWVNLNLWQKLKLSRDDAKPLLRLKGFPSFPLVERQANEVDWWDMVCNVKKLINEKKEDGKVFWQNLAGYKRQEALRPYLSSEEDRKKGKKFARYQLGDLLLHLEKKHGEDWGKVYDEAWERIDKKVEGLSKHIKLEEERRSEDAQSKAALTDWLRAKASFVIEGLKEADKDEFCRCELKLQKWYGDLRGKPFAIEAENSILDISGFSKQYNCAFIWQKDGVKKLNLYLIINYFKGGKLRFKKIKPEAFEANRFYTVINKKSGEIVPMEVNFNFDDPNLIILPLAFGKRQGREFIWNDLLSLETGSLKLANGRVIEKTLYNRRTRQDEPALFVALTFERREVLDSSNIKPMNLIGVDRGENIPAVIALTDPEGCPLSRFKDSLGNPTHILRIGESYKEKQRTIQAKKEVEQRRAGGYSRKYASKAKNLADDMVRNTARDLLYYAVTQDAMLIFENLSRGFGRQGKRTFMAERQYTRMEDWLTAKLAYEGLPSKTYLSKTLAQYTSKTCSNCGFTITSADYDRVLEKLKKTATGWMTTINGKELKVEGQITYYNRYKRQNVVKDLSVELDRLSEESVNNDISSWTKGRSGEALSLLKKRFSHRPVQEKFVCLNCGFETHADEQAALNIARSWLFLRSQEYKKYQTNKTTGNTDKRAFVETWQSFYRKKLKEVWKPAV

SEQ ID NO: 915 - protein, 978 aa, Artificial Sequence
  CasX Variant
QEIKRINKIRRRLVKDSNTKKAGKTGPMKTLLVRVMTPDLRERLENLRKKPENIPQPISNTSRANLNKLLTDYTEMKKAILHVYWEEFQKDPVGLMSRVAQPASKKIDQNKLKPEMDEKGNLTTAGFACSQCGQPLFVYKLEQVSEKGKAYTNYFGRCNVAEHEKLILLAQLKPEKDSDEAVTYSLGKFGQRALDFYSIHVTKESTHPVKPLAQIAGNRYASGPVGKALSDACMGTIASFLSKYQDIIIEHQKVVKGNQKRLESLRELAGKENLEYPSVTLPPQPHTKEGVDAYNEVIARVRMWVNLNLWQKLKLSRDDAKPLLRLKRFPSFPLVERQANEVDWWDMVCNVKKLINEKKEDGKVFWQNLAGYKRQEALRPYLSSEEDRKKGKKFARYQLGDLLLHLEKKHGEDWGKVYDEAWERIDKKVEGLSKHIKLEEERRSEDAQSKAALTDWLRAKASFVIEGLKEADKDEFCRCELKLQKWYGDLRGKPFAIEAENSILDISGFSKQYNCAFIWQKDGVKKLNLYLIINYFKGGKLRFKKIKPEAFEANRFYTVINKKSGEIVPMEVNFNFDDPNLIILPLAFGKRQGREFIWNDLLSLETGSLKLANGRVIEKTLYNRRTRQDEPALFVALTFERREVLDSSNIKPMNLIGVDRGENIPAVIALTDPEGCPLSRFKDSLGNPTHILRIGESYKEKQRTIQAKKEVEQRRAGGYSRKYASKAKNLADDMVRNTARDLLYYAVTQDAMLIFENLSRGFGRQGKRTFMAERQYTRMEDWLTAKLAYEGLPSKTYLSKTLAQYTSKTCSNCGFTITSADYDRVLEKLKKTATGWMTTINGKELKVEGQITYYNRYKRQNVVKDLSVELDRLSEESVNNDISSWTKGRSGEALSLLKKRFSHRPVQEKFVCLNCGFETHADEQAALNIARSWLFLRSQEYKKYQTNKTTGNTDKRAFVETWQSFYRKKLKEVWKPAV

SEQ ID NO: 916 - protein, 978 aa, Artificial Sequence
  CasX Variant
QEIKRINKIRRRLVKDSNTKKAGKTGPMKTLLVRVMTPDLRERLENLRKKPENIPQPISNTSRANLNKLLTDYTEMKKAILHVYWEEFQKDPVGLMSRVAQPASKKIDQNKLKPEMDEKGNLTTAGFACSQCGQPLFVYKLEQVSEKGKAYTNYFGRCNVAEHEKLILLAQLKPEKDSDEAVTYSLGKFGQRALDFYSIHVTKESTHPVKPLAQIAGNRYASGPVGKALSDACMGTIASFLSKYQDIIIEHQKVVKGNQKRLESLRELAGKENLEYPSVTLPPQPHTKEGVDAYNEVIARVRMWVNLNLWQKLKLSRDDAKPLLRLKKFPSFPLVERQANEVDWWDMVCNVKKLINEKKEDGKVFWQNLAGYKRQEALRPYLSSEEDRKKGKKFARYQLGDLLLHLEKKHGEDWGKVYDEAWERIDKKVEGLSKHIKLEEERRSEDAQSKAALTDWLRAKASFVIEGLKEADKDEFCRCELKLQKWYGDLRGKPFAIEAENSILDISGFSKQYNCAFIWQKDGVKKLNLYLIINYFKGGKLRFKKIKPEAFEANRFYTVINKKSGEIVPMEVNFNFDDPNLIILPLAFGKRQGREFIWNDLLSLETGSLKLANGRVIEKTLYNRRTRQDEPALFVALTFERREVLDSSNIKPMNLIGVDRGENIPAVIALTDPEGCPLSRFKDSLGNPTHILRIGESYKEKQRTIQAKKEVEQRRAGGYSRKYASKAKNLADDMVRNTARDLLYYAVTQDAMLIFENLSRGFGRQGKRTFMAERQYTRMEDWLTAKLAYEGLPSKTYLSKTLAQYTSKTCSNCGFTITSADYDRVLEKLKKTATGWMTTINGKELKVEGQITYYNRYKRQNVVKDLSVELDRLSEESVNNDISSWTKGRSGEALSLLKKRFSHRPVQEKFVCLNCGFETHADEQAALNIARSWLFLRSQEYKKYQTNKTTGNTDKRAFVETWQSFYRKKLKEVWKPAV

SEQ ID NO: 917 - protein, 978 aa, Artificial Sequence
  CasX Variant
QEIKRINKIRRRLVKDSNTKKAGKTGPMKTLLVRVMTPDLRERLENLRKKPENIPQPISNTSRANLNKLLTDYTEMKKAILHVYWEEFQKDPVGLMSRVAQPASKKIDQNKLKPEMDEKGNLTTAGFACSQCGQPLFVYKLEQVSEKGKAYTNYFGRCNVAEHEKLILLAQLKPEKDSDEAVTYSLGKFGQRALDFYSIHVTKESTHPVKPLAQIAGNRYASGPVGKALSDACMGTIASFLSKYQDIIIEHQKVVKGNQKRLESLRELAGKENLEYPSVTLPPQPHTKEGVDAYNEVIARVRMWVNKNLWQKLKLSRDDAKPLLRLKGFPSFPLVERQANEVDWWDMVCNVKKLINEKKEDGKVFWQNLAGYKRQEALRPYLSSEEDRKKGKKFARYQLGDLLLHLEKKHGEDWGKVYDEAWERIDKKVEGLSKHIKLEEERRSEDAQSKAALTDWLRAKASFVIEGLKEADKDEFCRCELKLQKWYGDLRGKPFAIEAENSILDISGFSKQYNCAFIWQKDGVKKLNLYLIINYFKGGKLRFKKIKPEAFEANRFYTVINKKSGEIVPMEVNFNFDDPNLIILPLAFGKRQGREFIWNDLLSLETGSLKLANGRVIEKTLYNRRTRQDEPALFVALTFERREVLDSSNIKPMNLIGVDRGENIPAVIALTDPEGCPLSRFKDSLGNPTHILRIGESYKEKQRTIQAKKEVEQRRAGGYSRKYASKAKNLADDMVRNTARDLLYYAVTQDAMLIFENLSRGFGRQGKRTFMAERQYTRMEDWLTAKLAYEGLPSKTYLSKTLAQYTSKTCSNCGFTITSADYDRVLEKLKKTATGWMTTINGKELKVEGQITYYNRYKRQNVVKDLSVELDRLSEESVNNDISSWTKGRSGEALSLLKKRFSHRPVQEKFVCLNCGFETHADEQAALNIARSWLFLRSQEYKKYQTNKTTGNTDKRAFVETWQSFYRKKLKEVWKPAV

SEQ ID NO: 918 - protein, 978 aa, Artificial Sequence
  CasX Variant
QEIKRINKIRRRLVKDSNTKKAGKTGPMKTLLVRVMTPDLRERLENLRKKPENIPQPISNTSRANLNKLLTDYTEMKKAILHVYWEEFQKDPVGLMSRVAQPASKKIDQNKLKPEMDEKGNLTTAGFACSQCGQPLFVYKLEQVSEKGKAYTNYFGRCNVAEHEKLILLAQLKPEKDSDEAVTYSLGKFGQRALDFYSIHVTKESTHPVKPLAQIAGNRYASGPVGKALSDACMGTIASFLSKYQDIIIEHQKVVKGNQKRLESLRELAGKENLEYPSVTLPPQPHTKEGVDAYNEVIARVRRWVNLNLWQKLKLSRDDAKPLLRLKGFPSFPLVERQANEVDWWDMVCNVKKLINEKKEDGKVFWQNLAGYKRQEALRPYLSSEEDRKKGKKFARYQLGDLLLHLEKKHGEDWGKVYDEAWERIDKKVEGLSKHIKLEEERRSEDAQSKAALTDWLRAKASFVIEGLKEADKDEFCRCELKLQKWYGDLRGKPFAIEAENSILDISGFSKQYNCAFIWQKDGVKKLNLYLIINYFKGGKLRFKKIKPEAFEANRFYTVINKKSGEIVPMEVNFNFDDPNLIILPLAFGKRQGREFIWNDLLSLETGSLKLANGRVIEKTLYNRRTRQDEPALFVALTFERREVLDSSNIKPMNLIGVDRGENIPAVIALTDPEGCPLSRFKDSLGNPTHILRIGESYKEKQRTIQAKKEVEQRRAGGYSRKYASKAKNLADDMVRNTARDLLYYAVTQDAMLIFENLSRGFGRQGKRTFMAERQYTRMEDWLTAKLAYEGLPSKTYLSKTLAQYTSKTCSNCGFTITSADYDRVLEKLKKTATGWMTTINGKELKVEGQITYYNRYKRQNVVKDLSVELDRLSEESVNNDISSWTKGRSGEALSLLKKRFSHRPVQEKFVCLNCGFETHADEQAALNIARSWLFLRSQEYKKYQTNKTTGNTDKRAFVETWQSFYRKKLKEVWKPAV

SEQ ID NO: 919 - protein, 978 aa, Artificial Sequence
  CasX Variant
QEIKRINKIRRRLVKDSNTKKAGKTGPMKTLLVRVMTPDLRERLENLRKKPENIPQPISNTSRANLNKLLTDYTEMKKAILHVYWEEFQKDPVGLMSRVAQPASKKIDQNKLKPEMDEKGNLTTAGFACSQCGQPLFVYKLEQVSEKGKAYTNYFGRCNVAEHEKLILLAQLKPEKDSDEAVTYSLGKFGQRALDFYSIHVTKESTHPVKPLAQIAGNRYASGPVGKALSDACMGTIASFLSKYQDIIIEHQKVVKGNQKRLESLRELAGKENLEYPSVTLPPQPHTKEGVDAYNEVIARVRKWVNLNLWQKLKLSRDDAKPLLRLKGFPSFPLVERQANEVDWWDMVCNVKKLINEKKEDGKVFWQNLAGYKRQEALRPYLSSEEDRKKGKKFARYQLGDLLLHLEKKHGEDWGKVYDEAWERIDKKVEGLSKHIKLEEERRSEDAQSKAALTDWLRAKASFVIEGLKEADKDEFCRCELKLQKWYGDLRGKPFAIEAENSILDISGFSKQYNCAFIWQKDGVKKLNLYLIINYFKGGKLRFKKIKPEAFEANRFYTVINKKSGEIVPMEVNFNFDDPNLIILPLAFGKRQGREFIWNDLLSLETGSLKLANGRVIEKTLYNRRTRQDEPALFVALTFERREVLDSSNIKPMNLIGVDRGENIPAVIALTDPEGCPLSRFKDSLGNPTHILRIGESYKEKQRTIQAKKEVEQRRAGGYSRKYASKAKNLADDMVRNTARDLLYYAVTQDAMLIFENLSRGFGRQGKRTFMAERQYTRMEDWLTAKLAYEGLPSKTYLSKTLAQYTSKTCSNCGFTITSADYDRVLEKLKKTATGWMTTINGKELKVEGQITYYNRYKRQNVVKDLSVELDRLSEESVNNDISSWTKGRSGEALSLLKKRFSHRPVQEKFVCLNCGFETHADEQAALNIARSWLFLRSQEYKKYQTNKTTGNTDKRAFVETWQSFYRKKLKEVWKPAV

SEQ ID NO: 920 - protein, 978 aa, Artificial Sequence
  CasX Variant
QEIKRINKIRRRLVKDSNTKKAGKTGPMKTLLVRVMTPDLRERLENLRKKPENIPQPISNTSRANLNKLLTDYTEMKKAILHVYWEEFQKDPVGLMSRVAQPASKKIDQNKLKPEMDEKGNLTTAGFACSQCGQPLFVYKLEQVSEKGKAYTNYFGRCNVAEHEKLILLAQLKPEKDSDEAVTYSLGKFGQRALDFYSIHVTKESTHPVKPLAQIAGNRYASGPVGKALSDACMGTIASFLSKYQDIIIEHQKVVKGNQKRLESLRELAGKENLEYPSVTLPPQPHTKEGVDAYNEVIARVRMWVNLNLWQKLKLSRDDAKPLLRLKGFPSFPLVERQANEVDWWDMVCNVKKLINEKKEDGKVFWQNLAGYKRQEALRPYLSSEEDRKKGKKFARYQLGDLLLHLEKKHGEDWGKVYDEAWERIDKKVEGLSKHIKLEEERRSEDAQSKAALTDWLRAKASFVIEGLKEADKDEFRRCELKLQKWYGDLRGKPFAIEAENSILDISGFSKQYNCAFIWQKDGVKKLNLYLIINYFKGGKLRFKKIKPEAFEANRFYTVINKKSGEIVPMEVNFNFDDPNLIILPLAFGKRQGREFIWNDLLSLETGSLKLANGRVIEKTLYNRRTRQDEPALFVALTFERREVLDSSNIKPMNLIGVDRGENIPAVIALTDPEGCPLSRFKDSLGNPTHILRIGESYKEKQRTIQAKKEVEQRRAGGYSRKYASKAKNLADDMVRNTARDLLYYAVTQDAMLIFENLSRGFGRQGKRTFMAERQYTRMEDWLTAKLAYEGLPSKTYLSKTLAQYTSKTCSNCGFTITSADYDRVLEKLKKTATGWMTTINGKELKVEGQITYYNRYKRQNVVKDLSVELDRLSEESVNNDISSWTKGRSGEALSLLKKRFSHRPVQEKFVCLNCGFETHADEQAALNIARSWLFLRSQEYKKYQTNKTTGNTDKRAFVETWQSFYRKKLKEVWKPAV

SEQ ID NO: 921 - protein, 978 aa, Artificial Sequence
  CasX Variant
QEIKRINKIRRRLVKDSNTKKAGKTGPMKTLLVRVMTPDLRERLENLRKKPENIPQPISNTSRANLNKLLTDYTEMKKAILHVYWEEFQKDPVGLMSRVAQPASKKIDQNKLKPEMDEKGNLTTAGFACSQCGQPLFVYKLEQVSEKGKAYTNYFGRCNVAEHEKLILLAQLKPEKDSDEAVTYSLGKFGQRALDFYSIHVTKESTHPVKPLAQIAGNRYASGPVGKALSDACMGTIASFLSKYQDIIIEHQKVVKGNQKRLESLRELAGKENLEYPSVTLPPQPHTKEGVDAYNEVIARVRMWVNLNLWQKLKLSRDDAKPLLRLKGFPSFPLVERQANEVDWWDMVCNVKKLINEKKEDGKVFWQNLAGYKRQEALRPYLSSEEDRKKGKKFARYQLGDLLLHLEKKHGEDWGKVYDEAWERIDKKVEGLSKHIKLEEERRSEDAQSKAALTDWLRAKASFVIEGLKEADKDEFKRCELKLQKWYGDLRGKPFAIEAENSILDISGFSKQYNCAFIWQKDGVKKLNLYLIINYFKGGKLRFKKIKPEAFEANRFYTVINKKSGEIVPMEVNFNFDDPNLIILPLAFGKRQGREFIWNDLLSLETGSLKLANGRVIEKTLYNRRTRQDEPALFVALTFERREVLDSSNIKPMNLIGVDRGENIPAVIALTDPEGCPLSRFKDSLGNPTHILRIGESYKEKQRTIQAKKEVEQRRAGGYSRKYASKAKNLADDMVRNTARDLLYYAVTQDAMLIFENLSRGFGRQGKRTFMAERQYTRMEDWLTAKLAYEGLPSKTYLSKTLAQYTSKTCSNCGFTITSADYDRVLEKLKKTATGWMTTINGKELKVEGQITYYNRYKRQNVVKDLSVELDRLSEESVNNDISSWTKGRSGEALSLLKKRFSHRPVQEKFVCLNCGFETHADEQAALNIARSWLFLRSQEYKKYQTNKTTGNTDKRAFVETWQSFYRKKLKEVWKPAV

SEQ ID NO: 922 - protein, 978 aa, Artificial Sequence
  CasX Variant
QEIKRINKIRRRLVKDSNTKKAGKTGPMKTLLVRVMTPDLRERLENLRKKPENIPQPISNTSRANLNKLLTDYTEMKKAILHVYWEEFQKDPVGLMSRVAQPASKKIDQNKLKPEMDEKGNLTTAGFACSQCGQPLFVYKLEQVSEKGKAYTNYFGRCNVAEHEKLILLAQLKPEKDSDEAVTYSLGKFGQRALDFYSIHVTKESTHPVKPLAQIAGNRYASGPVGKALSDACMGTIASFLSKYQDIIIEHQKVVKGNQKRLESLRELAGKENLEYPSVTLPPQPHTKEGVDAYNEVIARVRMWVNLNLWQKLKLSRDDAKPLLRLKGFPSFPLVERQANEVDWWDMVCNVKKLINEKKEDGKVFWQNLAGYKRQEALRPYLSSEEDRKKGKKFARYQLGDLLLHLEKKHGEDWGKVYDEAWERIDKKVEGLSKHIKLEEERRSEDAQSKAALTDWLRAKASFVIEGLKEADKDEFCRCELKLQKWYGDLRGKPFAIEAENSILDISGFSKQYNCAFIWQKDGVKKLNLYLIINYFKGGKLRFKKIKPEAFEANRFYTVINKKSGEIVPMEVNFNFDDPNLIILPLAFGKRQGREFIWNDLLSLETGSLKLANGRVIEKTLYNRRTRQDEPALFVALTFERREVLDSSNIKPMNLIGVDRGENIPAVIALTDPEGCPLSRFKDSLGNPTHILRIGERYKEKQRTIQAKKEVEQRRAGGYSRKYASKAKNLADDMVRNTARDLLYYAVTQDAMLIFENLSRGFGRQGKRTFMAERQYTRMEDWLTAKLAYEGLPSKTYLSKTLAQYTSKTCSNCGFTITSADYDRVLEKLKKTATGWMTTINGKELKVEGQITYYNRYKRQNVVKDLSVELDRLSEESVNNDISSWTKGRSGEALSLLKKRFSHRPVQEKFVCLNCGFETHADEQAALNIARSWLFLRSQEYKKYQTNKTTGNTDKRAFVETWQSFYRKKLKEVWKPAV

SEQ ID NO: 923 - protein, 978 aa, Artificial Sequence
  CasX Variant
QEIKRINKIRRRLVKDSNTKKAGKTGPMKTLLVRVMTPDLRERLENLRKKPENIPQPISNTSRANLNKLLTDYTEMKKAILHVYWEEFQKDPVGLMSRVAQPASKKIDQNKLKPEMDEKGNLTTAGFACSQCGQPLFVYKLEQVSEKGKAYTNYFGRCNVAEHEKLILLAQLKPEKDSDEAVTYSLGKFGQRALDFYSIHVTKESTHPVKPLAQIAGNRYASGPVGKALSDACMGTIASFLSKYQDIIIEHQKVVKGNQKRLESLRELAGKENLEYPSVTLPPQPHTKEGVDAYNEVIARVRMWVNLNLWQKLKLSRDDAKPLLRLKGFPSFPLVERQANEVDWWDMVCNVKKLINEKKEDGKVFWQNLAGYKRQEALRPYLSSEEDRKKGKKFARYQLGDLLLHLEKKHGEDWGKVYDEAWERIDKKVEGLSKHIKLEEERRSEDAQSKAALTDWLRAKASFVIEGLKEADKDEFCRCELKLQKWYGDLRGKPFAIEAENSILDISGFSKQYNCAFIWQKDGVKKLNLYLIINYFKGGKLRFKKIKPEAFEANRFYTVINKKSGEIVPMEVNFNFDDPNLIILPLAFGKRQGREFIWNDLLSLETGSLKLANGRVIEKTLYNRRTRQDEPALFVALTFERREVLDSSNIKPMNLIGVDRGENIPAVIALTDPEGCPLSRFKDSLGNPTHILRIGEKYKEKQRTIQAKKEVEQRRAGGYSRKYASKAKNLADDMVRNTARDLLYYAVTQDAMLIFENLSRGFGRQGKRTFMAERQYTRMEDWLTAKLAYEGLPSKTYLSKTLAQYTSKTCSNCGFTITSADYDRVLEKLKKTATGWMTTINGKELKVEGQITYYNRYKRQNVVKDLSVELDRLSEESVNNDISSWTKGRSGEALSLLKKRFSHRPVQEKFVCLNCGFETHADEQAALNIARSWLFLRSQEYKKYQTNKTTGNTDKRAFVETWQSFYRKKLKEVWKPAV

SEQ ID NO: 924 - protein, 977 aa, Artificial Sequence
  CasX Variant
QEIKRINKIRRRLVKDSNTKKAGKTGPMKTLLVRVMTPDLRERLENLRKKPENIPQPISNTSRANLNKLLTDYTEMKKAILHVYWEEFQKDPVGLMSRVAQPASKKIDQNKLKPEMDEKGNLTTAGFACSQCGQPLFVYKLEQVSEKGKAYTNYFGRCNVAEHEKLILLAQLKPEKDSDEAVTYSLGKFGQRALDFYSIHVTKESTHPVKPLAQIAGNRYASGPVGKALSDACMGTIASFLSKYQDIIIEHQKVVKGNQKRLESLRELAGKENLEYPSVTLPPQPHTKEGVDAYNEVIARVRMWVNLNLWQKLKLSRDDAKPLLRLKGFPSFPLVERQANEVDWWDMVCNVKKLINEKKEDGKVFWQNLAGYKRQEALRPYLSSEEDRKKGKKFARYQLGDLLLHLEKKHGEDWGKVYDEAWERIDKKVEGLSKHIKLEEERRSEDAQSKAALTDWLRAKASFVIEGLKEADKDEFCRCELKLQKWYGDLRGKPFAIEAENILDISGFSKQYNCAFIWQKDGVKKLNLYLIINYFKGGKLRFKKIKPEAFEANRFYTVINKKSGEIVPMEVNFNFDDPNLIILPLAFGKRQGREFIWNDLLSLETGSLKLANGRVIEKTLYNRRTRQDEPALFVALTFERREVLDSSNIKPMNLIGVDRGENIPAVIALTDPEGCPLSRFKDSLGNPTHILRIGESYKEKQRTIQAKKEVEQRRAGGYSRKYASKAKNLADDMVRNTARDLLYYAVTQDAMLIFENLSRGFGRQGKRTFMAERQYTRMEDWLTAKLAYEGLPSKTYLSKTLAQYTSKTCSNCGFTITSADYDRVLEKLKKTATGWMTTINGKELKVEGQITYYNRYKRQNVVKDLSVELDRLSEESVNNDISSWTKGRSGEALSLLKKRFSHRPVQEKFVCLNCGFETHADEQAALNIARSWLFLRSQEYKKYQTNKTTGNTDKRAFVETWQSFYRKKLKEVWKPAV

SEQ ID NO: 925 - protein, 977 aa, Artificial Sequence
  CasX Variant
QEIKRINKIRRRLVKDSNTKKAGKTGPMKTLLVRVMTPDLRERLENLRKKPENIPQPISNTSRANLNKLLTDYTEMKKAILHVYWEEFQKDPVGLMSRVAQPASKKIDQNKLKPEMDEKGNLTTAGFACSQCGQPLFVYKLEQVSEKGKAYTNYFGRCNVAEHEKLILLAQLKPEKDSDEAVTYSLGKFGQRALDFYSIHVTKESTHPVKPLAQIAGNRYASGPVGKALSDACMGTIASFLSKYQDIIIEHQKVVKGNQKRLESLRELAGKENLEYPSVTLPPQPHTKEGVDAYNEVIARVRMWVNLNLWQKLKLSRDDAKPLLRLKGFPSFPLVERQANEVDWWDMVCNVKKLINEKKEDGKVFWQNLAGYKRQEALRPYLSSEEDRKKGKKFARYQLGDLLLHLEKKHGEDWGKVYDEAWERIDKKVEGLSKHIKLEEERRSEDAQSKAALTDWLRAKASFVIEGLKEADKDEFCRCELKLQKWYGDLRGKPFAIEAENSIDISGFSKQYNCAFIWQKDGVKKLNLYLIINYFKGGKLRFKKIKPEAFEANRFYTVINKKSGEIVPMEVNFNFDDPNLIILPLAFGKRQGREFIWNDLLSLETGSLKLANGRVIEKTLYNRRTRQDEPALFVALTFERREVLDSSNIKPMNLIGVDRGENIPAVIALTDPEGCPLSRFKDSLGNPTHILRIGESYKEKQRTIQAKKEVEQRRAGGYSRKYASKAKNLADDMVRNTARDLLYYAVTQDAMLIFENLSRGFGRQGKRTFMAERQYTRMEDWLTAKLAYEGLPSKTYLSKTLAQYTSKTCSNCGFTITSADYDRVLEKLKKTATGWMTTINGKELKVEGQITYYNRYKRQNVVKDLSVELDRLSEESVNNDISSWTKGRSGEALSLLKKRFSHRPVQEKFVCLNCGFETHADEQAALNIARSWLFLRSQEYKKYQTNKTTGNTDKRAFVETWQSFYRKKLKEVWKPAV

SEQ ID NO: 926 - protein, 978 aa, Artificial Sequence
  CasX Variant
QEIKRINKIRRRLVKDSNTKKAGKTGPMKTLLVRVMTPDLRERLENLRKKPENIPQPISNTSRANLNKLLTDYTEMKKAILHVYWEEFQKDPVGLMSRVAQPASKKIDQNKLKPEMDEKGNLTTAGFACSQCGQPLFVYKLEQVSEKGKAYTNYFGRCNVAEHEKLILLAQLKPEKDSDEAVTYSLGKFGQRALDFYSIHVTKESTHPVKPLAQIAGNRYASGPVGKALSDACMGTIASFLSKYQDIIIEHQKVVKGNQKRLESLRELAGKENLEYPSVTLPPQPHTKEGVDAYNEVIARVRMWVNLNLWQKLKLSRDDAKPLLRLKGFPSFPLVERQANEVDWWDMVCNVKKLINEKKEDGKVFWQNLAGYKRQEALRPYLSSEEDRKKGKKFARYQLGDLLLHLEKKHGEDWGKVYDEAWERIDKKVEGLSKHIKLEEERRSEDAQSKAALTDWLRAKASFVIEGLKEADKDEFCRCELKLQKWYGDLRGKPFAIEAENSRLDISGFSKQYNCAFIWQKDGVKKLNLYLIINYFKGGKLRFKKIKPEAFEANRFYTVINKKSGEIVPMEVNFNFDDPNLIILPLAFGKRQGREFIWNDLLSLETGSLKLANGRVIEKTLYNRRTRQDEPALFVALTFERREVLDSSNIKPMNLIGVDRGENIPAVIALTDPEGCPLSRFKDSLGNPTHILRIGESYKEKQRTIQAKKEVEQRRAGGYSRKYASKAKNLADDMVRNTARDLLYYAVTQDAMLIFENLSRGFGRQGKRTFMAERQYTRMEDWLTAKLAYEGLPSKTYLSKTLAQYTSKTCSNCGFTITSADYDRVLEKLKKTATGWMTTINGKELKVEGQITYYNRYKRQNVVKDLSVELDRLSEESVNNDISSWTKGRSGEALSLLKKRFSHRPVQEKFVCLNCGFETHADEQAALNIARSWLFLRSQEYKKYQTNKTTGNTDKRAFVETWQSFYRKKLKEVWKPAV

SEQ ID NO: 927 - protein, 978 aa, Artificial Sequence
  CasX Variant
QEIKRINKIRRRLVKDSNTKKAGKTGPMKTLLVRVMTPDLRERLENLRKKPENIPQPISNTSRANLNKLLTDYTEMKKAILHVYWEEFQKDPVGLMSRVAQPASKKIDQNKLKPEMDEKGNLTTAGFACSQCGQPLFVYKLEQVSEKGKAYTNYFGRCNVAEHEKLILLAQLKPEKDSDEAVTYSLGKFGQRALDFYSIHVTKESTHPVKPLAQIAGNRYASGPVGKALSDACMGTIASFLSKYQDIIIEHQKVVKGNQKRLESLRELAGKENLEYPSVTLPPQPHTKEGVDAYNEVIARVRMWVNLNLWQKLKLSRDDAKPLLRLKGFPSFPLVERQANEVDWWDMVCNVKKLINEKKEDGKVFWQNLAGYKRQEALRPYLSSEEDRKKGKKFARYQLGDLLLHLEKKHGEDWGKVYDEAWERIDKKVEGLSKHIKLEEERRSEDAQSKAALTDWLRAKASFVIEGLKEADKDEFCRCELKLQKWYGDLRGKPFAIEAENSKLDISGFSKQYNCAFIWQKDGVKKLNLYLIINYFKGGKLRFKKIKPEAFEANRFYTVINKKSGEIVPMEVNFNFDDPNLIILPLAFGKRQGREFIWNDLLSLETGSLKLANGRVIEKTLYNRRTRQDEPALFVALTFERREVLDSSNIKPMNLIGVDRGENIPAVIALTDPEGCPLSRFKDSLGNPTHILRIGESYKEKQRTIQAKKEVEQRRAGGYSRKYASKAKNLADDMVRNTARDLLYYAVTQDAMLIFENLSRGFGRQGKRTFMAERQYTRMEDWLTAKLAYEGLPSKTYLSKTLAQYTSKTCSNCGFTITSADYDRVLEKLKKTATGWMTTINGKELKVEGQITYYNRYKRQNVVKDLSVELDRLSEESVNNDISSWTKGRSGEALSLLKKRFSHRPVQEKFVCLNCGFETHADEQAALNIARSWLFLRSQEYKKYQTNKTTGNTDKRAFVETWQSFYRKKLKEVWKPAV

SEQ ID NO: 928 - protein, 978 aa, Artificial Sequence
  CasX Variant
QEIKRINKIRRRLVKDSNTKKAGKTGPMKTLLVRVMTPDLRERLENLRKKPENIPQPISNTSRANLNKLLTDYTEMKKAILHVYWEEFQKDPVGLMSRVAQPASKKIDQNKLKPEMDEKGNLTTAGFACSQCGQPLFVYKLEQVSEKGKAYTNYFGRCNVAEHEKLILLAQLKPEKDSDEAVTYSLGKFGQRALDFYSIHVTKESTHPVKPLAQIAGNRYASGPVGKALSDACMGTIASFLSKYQDIIIEHQKVVKGNQKRLESLRELAGKENLEYPSVTLPPQPHTKEGVDAYNEVIARVRMWVNLNLWQKLKLSRDDAKPLLRLKGFPSFPLVERQANEVDWWDMVCNVKKLINEKKEDGKVFWQNLAGYKRQEALRPYLSSEEDRKKGKKFARYQLGDLLLHLEKKHGEDWGKVYDEAWERIDKKVEGLSKHIKLEEERRSEDAQSKAALTDWLRAKASFVIEGLKEADKDEFCRCELKLQKWYGDLRGKPFAIEAENSILDISGFSKQYNCAFIWQKDGVKKLNLYLIINYFKGGKLRFKKIKPEAFEANRFYTVINKKSGEIVPMEVNFNFDDPNLIILPLAFGKRQGREFIWNDLLSLETGSLQLANGRVIEKTLYNRRTRQDEPALFVALTFERREVLDSSNIKPMNLIGVDRGENIPAVIALTDPEGCPLSRFKDSLGNPTHILRIGESYKEKQRTIQAKKEVEQRRAGGYSRKYASKAKNLADDMVRNTARDLLYYAVTQDAMLIFENLSRGFGRQGKRTFMAERQYTRMEDWLTAKLAYEGLPSKTYLSKTLAQYTSKTCSNCGFTITSADYDRVLEKLKKTATGWMTTINGKELKVEGQITYYNRYKRQNVVKDLSVELDRLSEESVNNDISSWTKGRSGEALSLLKKRFSHRPVQEKFVCLNCGFETHADEQAALNIARSWLFLRSQEYKKYQTNKTTGNTDKRAFVETWQSFYRKKLKEVWKPAV

SEQ ID NO: 929 - protein, 978 aa, Artificial Sequence
  CasX Variant
QEIKRINKIRRRLVKDSNTKKAGKTGPMKTLLVRVMTPDLRERLENLRKKPENIPQPISNTSRANLNKLLTDYTEMKKAILHVYWEEFQKDPVGLMSRVAQPASKKIDQNKLKPEMDEKGNLTTAGFACSQCGQPLFVYKLEQVSEKGKAYTNYFGRCNVAEHEKLILLAQLKPEKDSDEAVTYSLGKFGQRALDFYSIHVTKESTHPVKPLAQIAGNRYASGPVGKALSDACMGTIASFLSKYQDIIIEHQKVVKGNQKRLESLRELAGKENLEYPSVTLPPQPHTKEGVDAYNEVIARVRMWVNLNLWQKLKLSRDDAKPLLRLKGFPSFPLVERQANEVDWWDMVCNVKKLINEKKEDGKVFWQNLAGYKRQEALRPYLSSEEDRKKGKKFARYQLGDLLLHLEKKHGEDWGKVYDEAWERIDKKVEGLSKHIKLEEERRSEDAQSKAALTDWLRAKASFVIEGLKEADKDEFCRCELKLQKWYGDLRGKPFAIEAENSILDISGFSKQYNCAFIWQKDGVKKLNLYLIINYFKGGKLRFKKIKPEAFEANRFYTVINKKSGEIVPMEVNFNFDDPNLIILPLAFGKRQGREFIWNDLLSLETGSLKLANGQVIEKTLYNRRTRQDEPALFVALTFERREVLDSSNIKPMNLIGVDRGENIPAVIALTDPEGCPLSRFKDSLGNPTHILRIGESYKEKQRTIQAKKEVEQRRAGGYSRKYASKAKNLADDMVRNTARDLLYYAVTQDAMLIFENLSRGFGRQGKRTFMAERQYTRMEDWLTAKLAYEGLPSKTYLSKTLAQYTSKTCSNCGFTITSADYDRVLEKLKKTATGWMTTINGKELKVEGQITYYNRYKRQNVVKDLSVELDRLSEESVNNDISSWTKGRSGEALSLLKKRFSHRPVQEKFVCLNCGFETHADEQAALNIARSWLFLRSQEYKKYQTNKTTGNTDKRAFVETWQSFYRKKLKEVWKPAV

SEQ ID NO: 930 - protein, 978 aa, Artificial Sequence
  CasX Variant
QEIKRINKIRRRLVKDSNTKKAGKTGPMKTLLVRVMTPDLRERLENLRKKPENIPQPISNTSRANLNKLLTDYTEMKKAILHVYWEEFQKDPVGLMSRVAQPASKKIDQNKLKPEMDEKGNLTTAGFACSQCGQPLFVYKLEQVSEKGKATTNYFGRCNVAEHEKLILLAQLKPEKDSDEAVTYSLGKFGQRALDFYSIHVTKESTHPVKPLAQIAGNRYASGPVGKALSDACMGTIASFLSKYQDIIIEHQKVVKGNQKRLESLRELAGKENLEYPSVTLPPQPHTKEGVDAYNEVIARVRMWVNLNLWQKLKLSRDDAKPLLRLKGFPSFPLVERQANEVDWWDMVCNVKKLINEKKEDGKVFWQNLAGYKRQEALRPYLSSEEDRKKGKKFARYQLGDLLLHLEKKHGEDWGKVYDEAWERIDKKVEGLSKHIKLEEERRSEDAQSKAALTDWLRAKASFVIEGLKEADKDEFCRCELKLQKWYGDLRGKPFAIEAENSILDISGFSKQYNCAFIWQKDGVKKLNLYLIINYFKGGKLRFKKIKPEAFEANRFYTVINKKSGEIVPMEVNFNFDDPNLIILPLAFGKRQGREFIWNDLLSLETGSLKLANGRVIEKTLYNRRTRQDEPALFVALTFERREVLDSSNIKPMNLIGVDRGENIPAVIALTDPEGCPLSRFKDSLGNPTHILRIGESYKEKQRTIQAKKEVEQRRAGGYSRKYASKAKNLADDMVRNTARDLLYYAVTQDAMLIFENLSRGFGRQGKRTFMAERQYTRMEDWLTAKLAYEGLPSKTYLSKTLAQYTSKTCSNCGFTITSADYDRVLEKLKKTATGWMTTINGKELKVEGQITYYNRYKRQNVVKDLSVELDRLSEESVNNDISSWTKGRSGEALSLLKKRFSHRPVQEKFVCLNCGFETHADEQAALNIARSWLFLRSQEYKKYQTNKTTGNTDKRAFVETWQSFYRKKLKEVWKPAV

SEQ ID NO: 931 - protein, 978 aa, Artificial Sequence
  CasX Variant
QEIKRINKIRRRLVKDSNTKKAGKTGPMKTLLVRVMTPDLRERLENLRKKPENIPQPISNTSRANLNKLLTDYTEMKKAILHVYWEEFQKDPVGLMSRVAQPASKKIDQNKLKPEMDEKGNLTTAGFACSQCGQPLFVYKLEQVSEKGKAYTNYFGRCNVAEHEKLILLAQLKPEKDSDEAVTYSLGQFGQRALDFYSIHVTKESTHPVKPLAQIAGNRYASGPVGKALSDACMGTIASFLSKYQDIIIEHQKVVKGNQKRLESLRELAGKENLEYPSVTLPPQPHTKEGVDAYNEVIARVRMWVNLNLWQKLKLSRDDAKPLLRLKGFPSFPLVERQANEVDWWDMVCNVKKLINEKKEDGKVFWQNLAGYKRQEALRPYLSSEEDRKKGKKFARYQLGDLLLHLEKKHGEDWGKVYDEAWERIDKKVEGLSKHIKLEEERRSEDAQSKAALTDWLRAKASFVIEGLKEADKDEFCRCELKLQKWYGDLRGKPFAIEAENSILDISGFSKQYNCAFIWQKDGVKKLNLYLIINYFKGGKLRFKKIKPEAFEANRFYTVINKKSGEIVPMEVNFNFDDPNLIILPLAFGKRQGREFIWNDLLSLETGSLKLANGRVIEKTLYNRRTRQDEPALFVALTFERREVLDSSNIKPMNLIGVDRGENIPAVIALTDPEGCPLSRFKDSLGNPTHILRIGESYKEKQRTIQAKKEVEQRRAGGYSRKYASKAKNLADDMVRNTARDLLYYAVTQDAMLIFENLSRGFGRQGKRTFMAERQYTRMEDWLTAKLAYEGLPSKTYLSKTLAQYTSKTCSNCGFTITSADYDRVLEKLKKTATGWMTTINGKELKVEGQITYYNRYKRQNVVKDLSVELDRLSEESVNNDISSWTKGRSGEALSLLKKRFSHRPVQEKFVCLNCGFETHADEQAALNIARSWLFLRSQEYKKYQTNKTTGNTDKRAFVETWQSFYRKKLKEVWKPAV

SEQ ID NO: 932 - protein, 978 aa, Artificial Sequence
  CasX Variant
QEIKRINKIRRRLVKDSNTKKAGKTGPMKTLLVRVMTPDLRERLENLRKKPENIPQPISNTSRANLNKLLTDYTEMKKAILHVYWEEFQKDPVGLMSRVAQPASKKIDQNKLKPEMDEKGNLTTAGFACSQCGQPLFVYKLEQVSEKGKAYTNYFGRCNVAEHEKLILLAQLKPEKDSDEAVTYSLGKFQQRALDFYSIHVTKESTHPVKPLAQIAGNRYASGPVGKALSDACMGTIASFLSKYQDIIIEHQKVVKGNQKRLESLRELAGKENLEYPSVTLPPQPHTKEGVDAYNEVIARVRMWVNLNLWQKLKLSRDDAKPLLRLKGFPSFPLVERQANEVDWWDMVCNVKKLINEKKEDGKVFWQNLAGYKRQEALRPYLSSEEDRKKGKKFARYQLGDLLLHLEKKHGEDWGKVYDEAWERIDKKVEGLSKHIKLEEERRSEDAQSKAALTDWLRAKASFVIEGLKEADKDEFCRCELKLQKWYGDLRGKPFAIEAENSILDISGFSKQYNCAFIWQKDGVKKLNLYLIINYFKGGKLRFKKIKPEAFEANRFYTVINKKSGEIVPMEVNFNFDDPNLIILPLAFGKRQGREFIWNDLLSLETGSLKLANGRVIEKTLYNRRTRQDEPALFVALTFERREVLDSSNIKPMNLIGVDRGENIPAVIALTDPEGCPLSRFKDSLGNPTHILRIGESYKEKQRTIQAKKEVEQRRAGGYSRKYASKAKNLADDMVRNTARDLLYYAVTQDAMLIFENLSRGFGRQGKRTFMAERQYTRMEDWLTAKLAYEGLPSKTYLSKTLAQYTSKTCSNCGFTITSADYDRVLEKLKKTATGWMTTINGKELKVEGQITYYNRYKRQNVVKDLSVELDRLSEESVNNDISSWTKGRSGEALSLLKKRFSHRPVQEKFVCLNCGFETHADEQAALNIARSWLFLRSQEYKKYQTNKTTGNTDKRAFVETWQSFYRKKLKEVWKPAV

SEQ ID NO: 933 - protein, 978 aa, Artificial Sequence; identical to SEQ ID NO: 699
  CasX Variant

SEQ ID NO: 934 - protein, 978 aa, Artificial Sequence
  CasX Variant
QEIKPINKIRRRLVKDSNTKKAGKTGPMKTLLVRVMTPDLRERLENLRKKPENIPQPISNTSRANLNKLLTDYTEMKKAILHVYWEEFQKDPVGLMSRVAQPASKKIDQNKLKPEMDEKGNLTTAGFACSQCGQPLFVYKLEQVSEKGKAYTNYFGRCNVAEHEKLILLAQLKPEKDSDEAVTYSLGKFGQRALDFYSIHVTKESTHPVKPLAQIAGNRYASGPVGKALSDACMGTIASFLSKYQDIIIEHQKVVKGNQKRLESLRELAGKENLEYPSVTLPPQPHTKEGVDAYNEVIARVRMWVNLNLWQKLKLSRDDAKPLLRLKGFPSFPLVERQANEVDWWDMVCNVKKLINEKKEDGKVFWQNLAGYKRQEALRPYLSSEEDRKKGKKFARYQLGDLLLHLEKKHGEDWGKVYDEAWERIDKKVEGLSKHIKLEEERRSEDAQSKAALTDWLRAKASFVIEGLKEADKDEFCRCELKLQKWYGDLRGKPFAIEAENSILDISGFSKQYNCAFIWQKDGVKKLNLYLIINYFKGGKLRFKKIKPEAFEANRFYTVINKKSGEIVPMEVNFNFDDPNLIILPLAFGKRQGREFIWNDLLSLETGSLKLANGRVIEKTLYNRRTRQDEPALFVALTFERREVLDSSNIKPMNLIGVDRGENIPAVIALTDPEGCPLSRFKDSLGNPTHILRIGESYKEKQRTIQAKKEVEQRRAGGYSRKYASKAKNLADDMVRNTARDLLYYAVTQDAMLIFENLSRGFGRQGKRTFMAERQYTRMEDWLTAKLAYEGLPSKTYLSKTLAQYTSKTCSNCGFTITSADYDRVLEKLKKTATGWMTTINGKELKVEGQITYYNRYKRQNVVKDLSVELDRLSEESVNNDISSWTKGRSGEALSLLKKRFSHRPVQEKFVCLNCGFETHADEQAALNIARSWLFLRSQEYKKYQTNKTTGNTDKRAFVETWQSFYRKKLKEVWKPAV

SEQ ID NO: 935 - protein, 978 aa, Artificial Sequence
  CasX Variant
QEIWRINKIRRRLVKDSNTKKAGKTGPMKTLLVRVMTPDLRERLENLRKKPENIPQPISNTSRANLNKLLTDYTEMKKAILHVYWEEFQKDPVGLMSRVAQPASKKIDQNKLKPEMDEKGNLTTAGFACSQCGQPLFVYKLEQVSEKGKAYTNYFGRCNVAEHEKLILLAQLKPEKDSDEAVTYSLGKFGQRALDFYSIHVTKESTHPVKPLAQIAGNRYASGPVGKALSDACMGTIASFLSKYQDIIIEHQKVVKGNQKRLESLRELAGKENLEYPSVTLPPQPHTKEGVDAYNEVIARVRMWVNLNLWQKLKLSRDDAKPLLRLKGFPSFPLVERQANEVDWWDMVCNVKKLINEKKEDGKVFWQNLAGYKRQEALRPYLSSEEDRKKGKKFARYQLGDLLLHLEKKHGEDWGKVYDEAWERIDKKVEGLSKHIKLEEERRSEDAQSKAALTDWLRAKASFVIEGLKEADKDEFCRCELKLQKWYGDLRGKPFAIEAENSILDISGFSKQYNCAFIWQKDGVKKLNLYLIINYFKGGKLRFKKIKPEAFEANRFYTVINKKSGEIVPMEVNFNFDDPNLIILPLAFGKRQGREFIWNDLLSLETGSLKLANGRVIEKTLYNRRTRQDEPALFVALTFERREVLDSSNIKPMNLIGVDRGENIPAVIALTDPEGCPLSRFKDSLGNPTHILRIGESYKEKQRTIQAKKEVEQRRAGGYSRKYASKAKNLADDMVRNTARDLLYYAVTQDAMLIFENLSRGFGRQGKRTFMAERQYTRMEDWLTAKLAYEGLPSKTYLSKTLAQYTSKTCSNCGFTITSADYDRVLEKLKKTATGWMTTINGKELKVEGQITYYNRYKRQNVVKDLSVELDRLSEESVNNDISSWTKGRSGEALSLLKKRFSHRPVQEKFVCLNCGFETHADEQAALNIARSWLFLRSQEYKKYQTNKTTGNTDKRAFVETWQSFYRKKLKEVWKPAV

SEQ ID NO: 936 - protein, 978 aa, Artificial Sequence; identical to SEQ ID NO: 693
  CasX Variant

SEQ ID NO: 937 - protein, 978 aa, Artificial Sequence
  CasX Variant
QEIKRINKIRRRLVKDSNTKKAGKTGPMKTLLVRVMTPDLRERLENLRKKPENIPQPISNTSRANLNKLLTDYTEMKKAILHVYWEEFQKDPVGLMSRVAQPASKKIDQNKLKPEMDEKGNLTTAGFACSQCGQPLFVYKLEQVSEKGKAYTNYFGRCNVAEHEKLILLAQLKPEKDSDEAVTYSLGKFGQRALDFYSIHVTKESTHPVKPLAQIAGNRYASGPVGKALSDACMGTIASFLSKYQDIIIEHQKVVKGNQKRLESLRELAGKENLEYPSVTLPPQPHTKEGVDAYNEVIARVRMWVNLNLWQKLKLSRDDAKPLLRLKGFPSFPLVERQANEVDWWDMVCNVKKLINEKKEDGKVFWQNLAGYKRQEALRPYLSSEEDRKKGKKFARYQLGDLLLHLEKKHGEDWGKVYDEAWERIDKKVEGLSKHIKLEEERRSEDAQSKAALTDWLRAKASFVIEGLKEADKDEFCRCELKLQKWYGDLRGKPFAIEAENSILDISGFSKQYNCAFIWQKDGVKKLNLYLIINYFKGGKLRFKKIKPEAFEANRFYTVINKKSGEIVPMEVNFNFDDPNLIILPLAFGKRQGREFIWNDLLSLETGSLKLANGRVIEKTLYNRRTRQDEPALFVALTFERAEVLDSSNIKPMNLIGVDRGENIPAVIALTDPEGCPLSRFKDSLGNPTHILRIGESYKEKQRTIQAKKEVEQRRAGGYSRKYASKAKNLADDMVRNTARDLLYYAVTQDAMLIFENLSRGFGRQGKRTFMAERQYTRMEDWLTAKLAYEGLPSKTYLSKTLAQYTSKTCSNCGFTITSADYDRVLEKLKKTATGWMTTINGKELKVEGQITYYNRYKRQNVVKDLSVELDRLSEESVNNDISSWTKGRSGEALSLLKKRFSHRPVQEKFVCLNCGFETHADEQAALNIARSWLFLRSQEYKKYQTNKTTGNTDKRAFVETWQSFYRKKLKEVWKPAV

SEQ ID NO: 938 - protein, 978 aa, Artificial Sequence
  CasX Variant
QEIKRINKIRRRLVKDSNTKKAGKTGPMKTLLVRVMTPDLRERLENLRKKPENIPQPISNTSRANLNKLLTDYTEMKKAILHVYWEEFQKDPVGLMSRVAQPASKKIDQNKLKPEMDEKGNLTTAGFACSQCGQPLFVYKLEQVSEKGKAYTNYFGRCNVAEHEKLILLAQLKPEKDSDEAVTYSLGKFGQRALDFYSIHVTKESTHPVKPLAQIAGNRYASGPVGKALSDACMLTIASFLSKYQDIIIEHQKVVKGNQKRLESLRELAGKENLEYPSVTLPPQPHTKEGVDAYNEVIARVRMWVNLNLWQKLKLSRDDAKPLLRLKGFPSFPLVERQANEVDWWDMVCNVKKLINEKKEDGKVFWQNLAGYKRQEALRPYLSSEEDRKKGKKFARYQLGDLLLHLEKKHGEDWGKVYDEAWERIDKKVEGLSKHIKLEEERRSEDAQSKAALTDWLRAKASFVIEGLKEADKDEFCRCELKLQKWYGDLRGKPFAIEAENSILDISGFSKQYNCAFIWQKDGVKKLNLYLIINYFKGGKLRFKKIKPEAFEANRFYTVINKKSGEIVPMEVNFNFDDPNLIILPLAFGKRQGREFIWNDLLSLETGSLKLANGRVIEKTLYNRRTRQDEPALFVALTFERREVLDSSNIKPMNLIGVDRGENIPAVIALTDPEGCPLSRFKDSLGNPTHILRIGESYKEKQRTIQAKKEVEQRRAGGYSRKYASKAKNLADDMVRNTARDLLYYAVTQDAMLIFENLSRGFGRQGKRTFMAERQYTRMEDWLTAKLAYEGLPSKTYLSKTLAQYTSKTCSNCGFTITSADYDRVLEKLKKTATGWMTTINGKELKVEGQITYYNRYKRQNVVKDLSVELDRLSEESVNNDISSWTKGRSGEALSLLKKRFSHRPVQEKFVCLNCGFETHADEQAALNIARSWLFLRSQEYKKYQTNKTTGNTDKRAFVETWQSFYRKKLKEVWKPAV

SEQ ID NO: 939 - protein, 978 aa, Artificial Sequence
  CasX Variant
QEIKRINKIRRRLVKDSNTKKAGKTGPMKTLLVRVMTPDLRERLENLRKKPENIPQPISNTSRANLNKLLTDYTEMKKAILHVYWEEFQKDPVGLMSRVAQPASKKIDQNKLKPEMDEKGNLTTAGFACSQCGQPLFVYKLEQVSEKGKAYTNYFGRCNVAEHEKLILLAQLKPEKDSDEAVTYSLGKFGQRALDFYSIHVTKESTHPVKPLAQIAGNRYASGPVGKALSDACMHTIASFLSKYQDIIIEHQKVVKGNQKRLESLRELAGKENLEYPSVTLPPQPHTKEGVDAYNEVIARVRMWVNLNLWQKLKLSRDDAKPLLRLKGFPSFPLVERQANEVDWWDMVCNVKKLINEKKEDGKVFWQNLAGYKRQEALRPYLSSEEDRKKGKKFARYQLGDLLLHLEKKHGEDWGKVYDEAWERIDKKVEGLSKHIKLEEERRSEDAQSKAALTDWLRAKASFVIEGLKEADKDEFCRCELKLQKWYGDLRGKPFAIEAENSILDISGFSKQYNCAFIWQKDGVKKLNLYLIINYFKGGKLRFKKIKPEAFEANRFYTVINKKSGEIVPMEVNFNFDDPNLIILPLAFGKRQGREFIWNDLLSLETGSLKLANGRVIEKTLYNRRTRQDEPALFVALTFERREVLDSSNIKPMNLIGVDRGENIPAVIALTDPEGCPLSRFKDSLGNPTHILRIGESYKEKQRTIQAKKEVEQRRAGGYSRKYASKAKNLADDMVRNTARDLLYYAVTQDAMLIFENLSRGFGRQGKRTFMAERQYTRMEDWLTAKLAYEGLPSKTYLSKTLAQYTSKTCSNCGFTITSADYDRVLEKLKKTATGWMTTINGKELKVEGQITYYNRYKRQNVVKDLSVELDRLSEESVNNDISSWTKGRSGEALSLLKKRFSHRPVQEKFVCLNCGFETHADEQAALNIARSWLFLRSQEYKKYQTNKTTGNTDKRAFVETWQSFYRKKLKEVWKPAV

SEQ ID NO: 940 - protein, 978 aa, Artificial Sequence
  CasX Variant
QEIKRINKIRRRLVKDSNTKKAGKTGPMKTLLVRVMTPDLRERLENLRKKPENIPQPISNTSRANLNKLLTDYTEMKKAILHVYWEEFQKDPVGLMSRVAQPASKKIDQNKLKPEMDEKGNLTTAGFACSQCGQPLFVYKLEQVSEKGKAYTNYFGRCNVAEHEKLILLAQLKPEKDSDEAVTYSLGKFGQRALDFYSIHVTKESTHPVKPLAQIAGNRYASGPVGKALSDACMGTIASFLSKYQDIIIEHQKVVKGNQKRLESLRELAGKENLEYPSVTLPPQPHTKEGVDAYNEVIARVRMWVNLNLWQKLKLSRDDAKPLLRLKGFPSFPLVERQANEVDWWDMVCNVKKLINEKKEDGKVFWQNLAGYKRQEALRPYLSSEEDRKKGKKFARYQLGDLLLHLEKKHGEDWGKVYDEAWERIDKKVEGLSKHIKLEEERRSEDAQSKAALTDWLRAKASFVIEGLKEADKDEFCRCELKLQKWYGDLRGKPFAIEAENSILDISGFSKQYNCAFIWQKDGVKKLNLYLIINYFKGGKLRFKKIKPEAFEANRFYTVINKKSGEIVPMEVNFNFDDPNLIILPLAFGKRQGREFIWNDLLSLETGSLKLANGRVIEKTLYNRRTRQDEPALFVALTFERREVLDSSNIKPMNLIGVDRGENIPAVIALTDPEGCPLSRFKDSLGNPTHILRIGESYKEKQRTIQAKKEVEQRRAGGYSRKYASKAKNLADDMVRNTARDLLYYAVTQDAMLIFENLSRGFGRQGKRTFMAERQYTRMEDWLTAKLAYEGLPSKTYLSKTLAQYTSKTCSNCGFTITSADYDRVLEKLKKTATGWMTTINGKELKVEGQITYYNRYKRQNVVKDLSVELDRLSEESVNNDISSWTKGRSGEALSLLKKRFSHRPTQEKFVCLNCGFETHADEQAALNIARSWLFLRSQEYKKYQTNKTTGNTDKRAFVETWQSFYRKKLKEVWKPAV

SEQ ID NO: 941 - protein, 978 aa, Artificial Sequence
  CasX Variant
QEIKRINKIRRRLVKDSNTKKAGKTGPMKTLLVRVMTPDLRERLENLRKKPENIPQPISNTSRANLNKLLTDYTEMKKAILHVYWEEFQKDPVGLMSRVAQPASKKIDQNKLKPEMDEKGNLTTAGFACSQCGQPLFVYKLEQVSEKGKAYTNYFGRCNVAEHEKLILLAQLKPEKDSDEAVTYSLGKFGQRALDFYSIHVTKESTHPVKPLAQIAGNRYASGPVGKALSDACMGTIASFLSKYQDIIIEHQKVVKGNQKRLESLRELAGKENLEYPSVTLPPQPHTKEGVDAYNEVIARVRMWVNLNLWQKLKLSRDDAKPLLRLKGFPSFPLVERQANEVDWWDMVCNVKKLINEKKEDGKVFWQNLAGYKRQEALRPYLSSEEDRKKGKKFARYQLGDLLLHLEKKHGEDWGKVYDEAWERIDKKVEGLSKHIKLEEERRSEDAQSKAALTDWLRAKASFVIEGLKEADKDEFCRCELKLQKWYGDLRGKPFAIEAENSILDISGFSKQYNCAFIWQKDGVKKLNLYLIINYFKGGKLEFKKIKPEAFEANRFYTVINKKSGEIVPMEVNFNFDDPNLIILPLAFGKRQGREFIWNDLLSLETGSLKLANGRVIEKTLYNRRTRQDEPALFVALTFERREVLDSSNIKPMNLIGVDRGENIPAVIALTDPEGCPLSRFKDSLGNPTHILRIGESYKEKQRTIQAKKEVEQRRAGGYSRKYASKAKNLADDMVRNTARDLLYYAVTQDAMLIFENLSRGFGRQGKRTFMAERQYTRMEDWLTAKLAYEGLPSKTYLSKTLAQYTSKTCSNCGFTITSADYDRVLEKLKKTATGWMTTINGKELKVEGQITYYNRYKRQNVVKDLSVELDRLSEESVNNDISSWTKGRSGEALSLLKKRFSHRPVQEKFVCLNCGFETHADEQAALNIARSWLFLRSQEYKKYQTNKTTGNTDKRAFVETWQSFYRKKLKEVWKPAV

SEQ ID NO: 942 - protein, 977 aa, Artificial Sequence
  CasX Variant
QEIKRINKIRRRLVKDSNTKKAGKTGPMKTLLVRVMTPDLRERLENLRKKPENIPQPISNTSRANLNKLLTDYTEMKKAILHVYWEEFQKDPVGLMSRVAQPASKKIDQNKLKPEMDEKGNLTTAGFACSQCGQPLFVYKLEQVSEKGKAYTNYFGRCNVAEHEKLILLAQLKPEKDSDEAVTYSLGKFGQRALDFYSIHVTKESTHPVKPLAQIAGNRYASGPVGKALSDACMGTIASFLSKYQDIIIEHQKVVKGNQKRLESLRELAGKENLEYPSVTLPPQPHTKEGVDAYNEVIARVRMWVNLNLWQKLKLSRDDAKPLLRLKGFPSFPLVERQANEVDWWDMVCNVKKLINEKKEDGKVFWQNLAGYKRQEALRPYLSSEEDRKKGKKFARYQLGDLLLHLEKKHGEDWGKVYDEAWERIDKKVEGLSKHIKLEEERRSEDAQSKAALTDWLRAKASFVIEGLKEADKDEFCRCELKLQKWYGDLRGKPFAIEAENSILDISGFSKQYNCAFIWQKDGVKKLNLYLIINYFKGGKLRFKKIKPEAFEANRFYTVINKSGEIVPMEVNFNFDDPNLIILPLAFGKRQGREFIWNDLLSLETGSLKLANGRVIEKTLYNRRTRQDEPALFVALTFERREVLDSSNIKPMNLIGVDRGENIPAVIALTDPEGCPLSRFKDSLGNPTHILRIGESYKEKQRTIQAKKEVEQRRAGGYSRKYASKAKNLADDMVRNTARDLLYYAVTQDAMLIFENLSRGFGRQGKRTFMAERQYTRMEDWLTAKLAYEGLPSKTYLSKTLAQYTSKTCSNCGFTITSADYDRVLEKLKKTATGWMTTINGKELKVEGQITYYNRYKRQNVVKDLSVELDRLSEESVNNDISSWTKGRSGEALSLLKKRFSHRPVQEKFVCLNCGFETHADEQAALNIARSWLFLRSQEYKKYQTNKTTGNTDKRAFVETWQSFYRKKLKEVWKPAV

SEQ ID NO: 943 - protein, 979 aa, Artificial Sequence
  CasX Variant
QEIKRINKIRRRLVKDSNTKKAGKTGPMKTLLVRVMTPDLRERLENLRKKPENIPQPISNTSRANLNKLLTDYTEMKKAILHVYWEEFQKDPVGLMSRVAQPASKKIDQNKLKPEMDEKGNLTTAGFACSQCGQPLFVYKLEQVSEKGKAYTNYFGRCNVAEHEKLILLAQLKPEKDSDEAVTYSLGKFGQRALDFYSIHVTKESTHPVKPLAQIAGNRYASGPVGKALSDACMGTIASFLSKYQDIIIEHQKVVKGNQKRLESLRELAGKENLEYPSVTLPPQPHTKEGVDAYNEVIARVRMWVNLNLWQKLKLSRDDAKPLLRLKGFPSFPLVERQANEVDWWDMVCNVKKLINEKKEDGKVFWQNLAGYKRQEALRPYLSSEEDRKKGKKFARYQLGDLLLHLEKKHGEDWGKVYDEAWERIDKKVEGLSKHIKLEEERRSEDAQSKAALTDWLRAKASFVIEGLKEADKDEFCRCELKLQKWYGDLRGKPFAIEAENSILDISGFSKQYNCAFIWQKDGVKKLNLYLIINYFKGGKLRFKKIKPEAFEANRFYTVINKKSGEIVPMEVNFNFDDPNLIILPLAFGKRQAGREFIWNDLLSLETGSLKLANGRVIEKTLYNRRTRQDEPALFVALTFERREVLDSSNIKPMNLIGVDRGENIPAVIALTDPEGCPLSRFKDSLGNPTHILRIGESYKEKQRTIQAKKEVEQRRAGGYSRKYASKAKNLADDMVRNTARDLLYYAVTQDAMLIFENLSRGFGRQGKRTFMAERQYTRMEDWLTAKLAYEGLPSKTYLSKTLAQYTSKTCSNCGFTITSADYDRVLEKLKKTATGWMTTINGKELKVEGQITYYNRYKRQNVVKDLSVELDRLSEESVNNDISSWTKGRSGEALSLLKKRFSHRPVQEKFVCLNCGFETHADEQAALNIARSWLFLRSQEYKKYQTNKTTGNTDKRAFVETWQSFYRKKLKEVWKPAV

SEQ ID NO: 944 - protein, 978 aa, Artificial Sequence
  CasX Variant
QEIKRINKIRRRLVKDSNTKKAGKTGPMKTLLVRVMTPDLRERLENLRKKPENIPQPISNTSRANLNKLLTDYTEMKKAILHVYWEEFQKDPVGLMSRVAQPASKKIDQNKLKPEMDEKGNLTTAGFACSQCGQPLFVYKLEQVSEKGKAYTNYFGRCNVAEHEKLILLAQLKPEKDSDEAVTYSLGKFGQRALDFYSIHVTKESTHPVKPLAQIAGNRYASGPVGKALSDACMGTIASFLSKYQDIIIEHQKVVKGNQKRLESLRELAGKENLEYPSVTLPPQPHTKEGVDAYNEVIARVRMWVNLNLWQKLKLSRDDAKPLLRLKGFPSFPLVERQANEVDWWDMVCNVKKLINEKKEDGKVFWQNLAGYKRQEALRPYLSSEEDRKKGKKFARYQLGDLLLHLEKKHGEDWGKVYDEAWERIDKKVEGLSKHIKLEKERRSEDAQSKAALTDWLRAKASFVIEGLKEADKDEFCRCELKLQKWYGDLRGKPFAIEAENSILDISGFSKQYNCAFIWQKDGVKKLNLYLIINYFKGGKLRFKKIKPEAFEANRFYTVINKKSGEIVPMEVNFNFDDPNLIILPLAFGKRQGREFIWNDLLSLETGSLKLANGRVIEKTLYNRRTRQDEPALFVALTFERREVLDSSNIKPMNLIGVDRGENIPAVIALTDPEGCPLSRFKDSLGNPTHILRIGESYKEKQRTIQAKKEVEQRRAGGYSRKYASKAKNLADDMVRNTARDLLYYAVTQDAMLIFENLSRGFGRQGKRTFMAERQYTRMEDWLTAKLAYEGLPSKTYLSKTLAQYTSKTCSNCGFTITSADYDRVLEKLKKTATGWMTTINGKELKVEGQITYYNRYKRQNVVKDLSVELDRLSEESVNNDISSWTKGRSGEALSLLKKRFSHRPVQEKFVCLNCGFETHADEQAALNIARSWLFLRSQEYKKYQTNKTTGNTDKRAFVETWQSFYRKKLKEVWKPAV

SEQ ID NO: 945 - RNA, 89 nt, Artificial Sequence
  variant guide RNA
acuggcgcuuuuaucugauuacuuugagagccaucaccagcgacuaugucguaguggguaaagcucccucuucggagggagcaucaaag

SEQ ID NO: 946 - RNA, 97 nt, Artificial Sequence
  variant guide RNA
acuggcgccuuuaucucauuacuuugagagccaucaccagcgacuaugucguauggguaaagcgcuuacggacuucgguccguaagaagcaucaaag

SEQ ID NO: 947 - RNA, 89 nt, Artificial Sequence
  variant guide RNA
gcuggcgcuuuuaucugauuacuuugagagccaucaccagcgacuaugucguaguggguaaagcucccucuucggagggagcaucaaag

SEQ ID NO: 948 - RNA, 88 nt, Artificial Sequence
  variant guide RNA
acuggcgcuuuuaucugauuacuuugagagccaucaccagcgacuaugucguauggguaaagcucccucuucggagggagcaucaaag

SEQ ID NO: 949 - RNA, 151 nt, Artificial Sequence
  variant guide RNA
acuggcgcuuuuaucugauuacuuugagagccaucaccagcgacuaugucguaguggguaaauaggagcugcacuaugggcgcagugucauugacgcugacgguacaggccagacaauuauugucugguauagugcagcuccuaaucaaag

SEQ ID NO: 950 - RNA, 97 nt, Artificial Sequence
  variant guide RNA
acuggcgccuuuaucugauuacuuugagagccaucaccagcgacuaugucguauggguaaagcgcuuacggacuucgguccguaagaagcaucaaag

SEQ ID NO: 951 - RNA, 97 nt, Artificial Sequence
  variant guide RNA
acuggcgcuuuuaucugauuacuuugagagccaucaccagcgacuaugucguauggguaaagcgcuuacggacuucgguccguaagaagcaucaaag

SEQ ID NO: 952 - RNA, 98 nt, Artificial Sequence
  variant guide RNA
acuggcgcuuuuaucugauuacuuugagagccaucaccagcgacuaugucguaguggguaaagcgcuuacggacuucgguccguaagaagcaucaaag

SEQ ID NO: 953 - RNA, 89 nt, Artificial Sequence
  variant guide RNA
acuggcgcuuuuaucugauuacuuugagagccaucaccagcgacuaugucguauuggguaaagcucccucuucggagggagcaucaaag

SEQ ID NO: 954 - RNA, 98 nt, Artificial Sequence
  variant guide RNA
acuggcgcuuuuaucugauuacuuugagagccaucaccagcgacuaugucguauuggguaaagcgcuuacggacuucgguccguaagaagcaucaaag

SEQ ID NO: 955 - RNA, 98 nt, Artificial Sequence
  variant guide RNA
acuggcgccuuuaucaucauuacuuugagagccaucaccagcgacuaugucguauggguaaagcgcuuacggacuucgguccguaagaagcaucaaag

SEQ ID NO: 956 - RNA, 90 nt, Artificial Sequence
  variant guide RNA
acuggcgcuuuuaucugauuacuuugagagccaucaccagcgacuaugucguaguggguaaagcgcccucuucggagggaagcaucaaag

SEQ ID NO: 957 - RNA, 96 nt, Artificial Sequence
  variant guide RNA
acuggcgcuuuuaucugauuacuuugagagccaucaccagcgacuaugucguaguggguaaagcucacaugaggaucacccaugugagcaucaaag

SEQ ID NO: 958 - RNA, 89 nt, Artificial Sequence
  variant guide RNA
acuggcacuuuuaccugauuacuuugagagccaacaccagcgacuaugucguaguggguaaagcucccucuucggagggagcaucaaag

SEQ ID NO: 959 - RNA, 89 nt, Artificial Sequence
  variant guide RNA
acuggcacuuuuaucugauuacuuugagagccaucaccagcgacuaugucguaguggguaaagcucccucuucggagggagcaucaaag

SEQ ID NO: 960 - RNA, 89 nt, Artificial Sequence
  variant guide RNA
acuggcccuuuuaucugauuacuuugagagccaucaccagcgacuaugucguaguggguaaagcucccucuucggagggagcaucaaag

SEQ ID NO: 961 - RNA, 89 nt, Artificial Sequence
  variant guide RNA
acuggcgcuuuuaccugauuacuuugagagccaucaccagcgacuaugucguaguggguaaagcucccucuucggagggagcaucaaag

SEQ ID NO: 962 - RNA, 89 nt, Artificial Sequence
  variant guide RNA
acuggcgcuuuuaucugauuacuuugagagccaacaccagcgacuaugucguaguggguaaagcucccucuucggagggagcaucaaag

SEQ ID NO: 963 - RNA, 97 nt, Artificial Sequence
  variant guide RNA
acuggcaccuuuaccugauuacuuugagagccaacaccagcgacuaugucguauggguaaagcgcuuacggacuucgguccguaagaagcaucaaag

SEQ ID NO: 964 - RNA, 97 nt, Artificial Sequence
  variant guide RNA
acuggcaccuuuaucugauuacuuugagagccaucaccagcgacuaugucguauggguaaagcgcuuacggacuucgguccguaagaagcaucaaag

SEQ ID NO: 965 - RNA, 97 nt, Artificial Sequence
  variant guide RNA
acuggccccuuuaucugauuacuuugagagccaucaccagcgacuaugucguauggguaaagcgcuuacggacuucgguccguaagaagcaucaaag

SEQ ID NO: 966 - RNA, 97 nt, Artificial Sequence
  variant guide RNA
acuggcgccuuuaucugauuacuuugagagccaacaccagcgacuaugucguauggguaaagcgcuuacggacuucgguccguaagaagcaucaaag

SEQ ID NO: 967 - RNA, 89 nt, Artificial Sequence; identical to SEQ ID NO: 947
  variant guide RNA

SEQ ID NO: 968 - RNA, 90 nt, Artificial Sequence
  variant guide RNA
gacuggcgcuuuuaucugauuacuuugagagccaucaccagcgacuaugucguaguggguaaagcucccucuucggagggagcaucaaag

SEQ ID NO: 969 - RNA, 90 nt, Artificial Sequence
  variant guide RNA
acuggcgccuuuaucugauuacuuuggagagccaucaccagcgacuaugucguaguggguaaagcucccucuucggagggagcaucaaag

SEQ ID NO: 970 - RNA, 89 nt, Artificial Sequence
  variant guide RNA
acuggcgcauuuaucugauuacuuugugagccaucaccagcgacuaugucguaguggguaaagcucccucuucggagggagcaucaaag

SEQ ID NO: 971 - RNA, 89 nt, Artificial Sequence
  variant guide RNA
acuggcgccuuuaucugauuacuuugagagccaucaccagcgacuaugucguaguggguaaagcucccucuucggagggagcaucaaag

SEQ ID NO: 972 - RNA, 90 nt, Artificial Sequence
  variant guide RNA
acuggcgcuuuuaucugauuacuuuggagagccaucaccagcgacuaugucguaguggguaaagcucccucuucggagggagcaucaaag

SEQ ID NO: 973 - RNA, 89 nt, Artificial Sequence
  variant guide RNA
acuggcgcauuuaucugauuacuuugagagccaucaccagcgacuaugucguaguggguaaagcucccucuucggagggagcaucaaag

SEQ ID NO: 974 - RNA, 89 nt, Artificial Sequence
  variant guide RNA
acuggcgcuuuuaucugauuacuuugugagccaucaccagcgacuaugucguaguggguaaagcucccucuucggagggagcaucaaag

SEQ ID NO: 975 - RNA, 90 nt, Artificial Sequence
  variant guide RNA
acuggcgcuuuuauucugauuacuuugagagccaucaccagcgacuaugucguaguggguaaagcucccucuucggagggagcaucaaag

SEQ ID NO: 976 - RNA, 88 nt, Artificial Sequence
  variant guide RNA
acggcgcuuuuaucugauuacuuugagagccaucaccagcgacuaugucguaguggguaaagcucccucuucggagggagcaucaaag

SEQ ID NO: 977 - RNA, 89 nt, Artificial Sequence
  variant guide RNA
acuggcgcuuuuauaugauuacuuugagagccaucaccagcgacuaugucguaguggguaaagcucccucuucggagggagcaucaaag

SEQ ID NO: 978 - RNA, 90 nt, Artificial Sequence
  variant guide RNA
acuggcgcuuuuaucuugauuacuuugagagccaucaccagcgacuaugucguaguggguaaagcucccucuucggagggagcaucaaag

SEQ ID NO: 979 - RNA, 89 nt, Artificial Sequence
  variant guide RNA
acuggcgcuuuuaucugauuacuuugagagccagcaccagcgacuaugucguaguggguaaagcucccucuucggagggagcaucaaag

SEQ ID NO: 980 - RNA, 89 nt, Artificial Sequence
  variant guide RNA
acuggcgcuguuaucugauuacuucgagagccaucaccagcgacuaugucguaguggguaaagcucccucuucggagggagcaucgaag

SEQ ID NO: 981 - RNA, 89 nt, Artificial Sequence
  variant guide RNA
acuggcgcucuuaucugauuacuucgagagccaucaccagcgacuaugucguaguggguaaagcucccucuucggagggagcaucgaag

SEQ ID NO: 982 - RNA, 89 nt, Artificial Sequence
  variant guide RNA
acuggcgcuuguaucugauuacucugagagccaucaccagcgacuaugucguaguggguaaagcucccucuucggagggagcaucagag

SEQ ID NO: 983 - RNA, 89 nt, Artificial Sequence
  variant guide RNA
acuggcgcuucuaucugauuacucugagagccaucaccagcgacuaugucguaguggguaaagcucccucuucggagggagcaucagag

SEQ ID NO: 984 - RNA, 89 nt, Artificial Sequence
  variant guide RNA
acuggcgcuuugaucugauuaccuugagagccaucaccagcgacuaugucguaguggguaaagcucccucuucggagggagcaucaagg

SEQ ID NO: 985 - RNA, 89 nt, Artificial Sequence
  variant guide RNA
acuggcgcuuucaucugauuaccuugagagccaucaccagcgacuaugucguaguggguaaagcucccucuucggagggagcaucaagg

SEQ ID NO: 986 - RNA, 89 nt, Artificial Sequence
  variant guide RNA
acuggcgcuguuaucugauuacuuugagagccaucaccagcgacuaugucguaguggguaaagcucccucuucggagggagcaucaaag

SEQ ID NO: 987 - RNA, 89 nt, Artificial Sequence
  variant guide RNA
acuggcgcuuuuaucugauuacuuugagagccaucaccagcgacuaugucguaguggguaaagcucccucuucggagggagcaucgaag

SEQ ID NO: 988 - RNA, 89 nt, Artificial Sequence
  variant guide RNA
acuggcgcuuuuaucugauuacuucgagagccaucaccagcgacuaugucguaguggguaaagcucccucuucggagggagcaucaaag

SEQ ID NO: 989 - RNA, 98 nt, Artificial Sequence
  variant guide RNA
acuggcacuucuaucugauuacucugagagccaucaccagcgacuaugucguauggguaaagccgcuuacggacuucgguccguaagaggcaucagag

SEQ ID NO: 990 - RNA, 89 nt, Artificial Sequence
  variant guide RNA
acuggcacuucuaucugauuacucugagagccaucaccagcgacuaugucguaguggguaaagcucccucuucggagggagcaucagag

SEQ ID NO: 991 - RNA, 98 nt, Artificial Sequence
  variant guide RNA
acuggcaccuuuaucugauuacuuugagagccaucaccagcgacuaugucguauggguaaagccgcuuacggacuucgguccguaagaggcaucaaag

SEQ ID NO: 992 - RNA, 98 nt, Artificial Sequence
  variant guide RNA
acuggcacuuguaucugauuacucugagagccaucaccagcgacuaugucguauggguaaagccgcuuacggacuucgguccguaagaggcaucagag

SEQ ID NO: 993 - RNA, 89 nt, Artificial Sequence
  variant guide RNA
acuggcacuuguaucugauuacucugagagccaucaccagcgacuaugucguaguggguaaagcucccucuucggagggagcaucagag

SEQ ID NO: 994 - RNA, 141 nt, Artificial Sequence
  variant guide RNA
acuggcgcuuuuaucugauuacuuugagagccaucaccagcgacuaugucguaguggguaaagcugcacuaugggcgcagcgucaaugacgcugacgguacaggccagacaauuauugucugguauagugcagcaucaaag

SEQ ID NO: 995 - RNA, 309 nt, Artificial Sequence
  variant guide RNA
acuggcgcuuuuaucugauuacuuugagagccaucaccagcgacuaugucguaguggguaaagcuaggagcuuuguuccuuggguucuugggagcagcaggaagcacuaugggcgcagcgucaaugacgcugacgguacaggccagacaauuauugucugguauagugcagcagcagaacaauuugcugagggcuauugaggcgcaacagcaucuguugcaacucacagucuggggcaucaagcagcuccaggcaagaauccuggcuguggaaagauaccuaaaggaucaacagcuccuagcaucaaag

SEQ ID NO: 996 - RNA, 100 nt, Artificial Sequence
  variant guide RNA
acuggcgcuuuuaucugauuacuuugagagccaucaccagcgacuaugucguaguggguaaagcuccccguacaccaucaggguacggggagcaucaaag

SEQ ID NO: 997 - RNA, 97 nt, Artificial Sequence
  variant guide RNA
acuggcacuuuuaucugauuacuuugagagccaucaccagcgacuaugucguauggguaaagcgcuuacggacuucgguccguaagaagcaucaaag

SEQ ID NO: 998 - RNA, 97 nt, Artificial Sequence
  variant guide RNA
acuggcacuucuaucugauuacucugagagccaucaccagcgacuaugucguauggguaaagcgcuuacggacuucgguccguaagaagcaucagag

SEQ ID NO: 999 - RNA, 98 nt, Artificial Sequence
  variant guide RNA
acuggcgcuucuaucugauuacucugagagccaucaccagcgacuaugucguauggguaaagccgcuuacggacuucgguccguaagaggcaucagag

SEQ ID NO: 1000 - RNA, 98 nt, Artificial Sequence
  variant guide RNA
acuggcacuucuaucugauuacucugagcgccaucaccagcgacuaugucguauggguaaagccgcuuacggacuucgguccguaagaggcaucagag

SEQ ID NO: 1001 - RNA, 98 nt, Artificial Sequence
  variant guide RNA
acuggcgcuucuaucugauuacucugagcgccaucaccagcgacuaugucguauggguaaagccgcuuacggacuucgguccguaagaggcaucagag

SEQ ID NO: 1002 - RNA, 98 nt, Artificial Sequence
  variant guide RNA
acuggcgcuucuaucugauuacucugagcgccaucaccagcgacuaugucguauggguaaagcgccuuacggacuucgguccguaaggagcaucagag

SEQ ID NO: 1003 - RNA, 99 nt, Artificial Sequence
  variant guide RNA
acuggcgcuucuaucugauuacucugagcgccaucaccagcgacuaugucguaguggguaaagccgcuuacggacuucgguccguaagaggcaucagag

SEQ ID NO: 1004 - RNA, 98 nt, Artificial Sequence
  variant guide RNA
acgggacuuucuaucugauuacucugaagucccucaccagcgacuaugucguauggguaaagccgcuuacggacuucgguccguaagaggcaucagag

SEQ ID NO: 1005 - RNA, 98 nt, Artificial Sequence
  variant guide RNA
accuguaguucuaucugauuacucugacuacagucaccagcgacuaugucguauggguaaagccgcuuacggacuucgguccguaagaggcaucagag

SEQ ID NO: 1006 - RNA, 113 nt, Artificial Sequence
  variant guide RNA
acuggcgcuuuuaucugauuacuuugagagccaucaccagcgacuaugucguaguggguaaagcugcacggugggcgcagcuucggcugacgguacaccgugcagcaucaaag

SEQ ID NO: 1007 - RNA, 143 nt, Artificial Sequence
  variant guide RNA
acuggcgcuuuuaucugauuacuuugagagccaucaccagcgacuaugucguaguggguaaagcugcacggugggcgcagcuucggcugacgguacaccggugggcgcagcuucggcugacgguacaccgugcagcaucaaag

SEQ ID NO: 1008 - RNA, 173 nt, Artificial Sequence
  variant guide RNA
acuggcgcuuuuaucugauuacuuugagagccaucaccagcgacuaugucguaguggguaaagcugcacggugggcgcagcuucggcugacgguacaccggugggcgcagcuucggcugacgguacaccggugggcgcagcuucggcugacgguacaccgugcagcaucaaag

SEQ ID NO: 1009 - RNA, 203 nt, Artificial Sequence
  variant guide RNA
acuggcgcuuuuaucugauuacuuugagagccaucaccagcgacuaugucguaguggguaaagcugcacggugggcgcagcuucggcugacgguacaccggugggcgcagcuucggcugacgguacaccggugggcgcagcuucggcugacgguacaccggugggcgcagcuucggcugacgguacaccgugcagcaucaaag

SEQ ID NO: 1010 - RNA, 233 nt, Artificial Sequence
  variant guide RNA
acuggcgcuuuuaucugauuacuuugagagccaucaccagcgacuaugucguaguggguaaagcugcacggugggcgcagcuucggcugacgguacaccggugggcgcagcuucggcugacgguacaccggugggcgcagcuucggcugacgguacaccggugggcgcagcuucggcugacgguacaccggugggcgcagcuucggcugacgguacaccgugcagcaucaaag

SEQ ID NO: 1011 - RNA, 97 nt, Artificial Sequence
  variant guide RNA
acuggcgcuuuuaucugauuacuuugagagccaucaccagcgacuaugucguaguggguaaagcugcaccuagcggaggcuaggugcagcaucaaag

SEQ ID NO: 1012 - RNA, 118 nt, Artificial Sequence
  variant guide RNA
acuggcgcuuuuaucugauuacuuugagagccaucaccagcgacuaugucguaguggguaaagcugcaccucggcuugcugaagcgcgcacggcaagaggcgaggugcagcaucaaag

SEQ ID NO: 1013 - RNA, 192 nt, Artificial Sequence
  variant guide RNA
acuggcgcuuuuaucugauuacuuugagagccaucaccagcgacuaugucguaguggguaaagcugcaccucucucgacgcaggacucggcuugcugaagcgcgcacggcaagaggcgaggggcggcgacuggugaguacgccaaaaauuuugacuagcggaggcuagaaggagagaggugcagcaucaaag

SEQ ID NO: 1014 - RNA, 156 nt, Artificial Sequence
  variant guide RNA
acuggcgcuuuuaucugauuacuuugagagccaucaccagcgacuaugucguaguggguaaagcugcacggugcccgucuguugugucgagagacgccaaaaauuuugacuagcggaggcuagaaggagagagaugggugccgugcagcaucaaag

SEQ ID NO: 1015 - RNA, 96 nt, Artificial Sequence
  variant guide RNA
acuggcgcuuuuaucugauuacuuugagagccaucaccagcgacuaugucguaguggguaaagcugcacauggagaggagaugugcagcaucaaag

SEQ ID NO: 1016 - RNA, 91 nt, Artificial Sequence
  variant guide RNA
acuggcgcuuuuaucugauuacuuugagagccaucaccagcgacuaugucguaguggguaaagcugcacauggagaugugcagcaucaaag

SEQ ID NO: 1017 - RNA, 106 nt, Artificial Sequence
  variant guide RNA
acuggcgcuuuuaucugauuacuuugagagccaucaccagcgacuaugucguaguggguaaagcuugggcgcagcgucaaugacgcugacgguacaagcaucaaag

SEQ ID NO: 1018 - RNA, 145 nt, Artificial Sequence
  variant guide RNA
acuggcgcuuuuaucugauuacuuugagagccaucaccagcgacuaugucguaguggguaaagcugcacuaugggcgcagcgucaaugacgcugacgguacaggccacaugaggaucacccaugugguauagugcagcaucaaag

SEQ ID NO: 1019 - RNA, 155 nt, Artificial Sequence
  variant guide RNA
acuggcgcuuuuaucugauuacuuugagagccaucaccagcgacuaugucguaguggguaaagcugcacuaugggcgcagcucaugaggaucacccaugagcugacgguacaggccacaugaggaucacccaugugguauagugcagcaucaaag

SEQ ID NO: 1020 - RNA, 151 nt, Artificial Sequence
  variant guide RNA
acuggcgcuuuuaucugauuacuuugagagccaucaccagcgacuaugucguaguggguaaagcugcacuaugggcgcagcgucaaugacgcugacgguacaggccacauggcagucguaacgacgcgggugguauagugcagcaucaaag

SEQ ID NO: 1021 - RNA, 172 nt, Artificial Sequence
  variant guide RNA
acuggcgcuuuuaucugauuacuuugagagccaucaccagcgacuaugucguaguggguaaagcugcacuaugggcgcagcaaacauggcaguccuaaggacgcggguuuugcugacgguacaggccacauggcagucguaacgacgcgggugguauagugcagcaucaaag

SEQ ID NO: 1022 - RNA, 159 nt, Artificial Sequence
  variant guide RNA
acuggcgcuuuuaucugauuacuuugagagccaucaccagcgacuaugucguaguggguaaagcugcacuaugggcgcagacauggcagucguaacgacgcgggucugacgguacaggccacaugaggaucacccaugugguauagugcagcaucaaag

SEQ ID NO: 1023 - RNA, 108 nt, Artificial Sequence
  variant guide RNA
acuggcgcuuuuaucugauuacuuugagagccaucaccagcgacuaugucguaguggguaaagcugcacuaaggaguuuauauggaaacccuuagugcagcaucaaag

SEQ ID NO: 1024 - RNA, 242 nt, Artificial Sequence
  variant guide RNA
acuggcgcuuuuaucugauuacuuugagagccaucaccagcgacuaugucguaguggguaaagcucaggaagcacuaugggcgcagcgucaaugacgcugacgguacaggccagacaauuauugucugguauagugcagcagcagaacaauuugcugagggcuauugaggcgcaacagcaucuguugcaacucacagucuggggcaucaagcagcuccaggcaagaauccugagcaucaaag

SEQ ID NO: 1025 - RNA, 98 nt, Artificial Sequence
  variant guide RNA
acuggcgcuuuuaucugauuacuuugagagccaucaccagcgacuaugucguaguggguaaagcugcacgcccugaagaagggcgugcagcaucaaag

SEQ ID NO: 1026 - RNA, 111 nt, Artificial Sequence
  variant guide RNA
acuggcgcuuuuaucugauuacuuugagagccaucaccagcgacuaugucguaguggguaaagcugcacggcucguguagcucauuagcuccgagccgugcagcaucaaag

SEQ ID NO: 1027 - RNA, 113 nt, Artificial Sequence
  variant guide RNA
acuggcgcuuuuaucugauuacuuugagagccaucaccagcgacuaugucguaguggguaaagcugcacccgugugcauccgcagugucggauccacgggugcagcaucaaag

SEQ ID NO: 1028 - RNA, 112 nt, Artificial Sequence
  variant guide RNA
acuggcgcuuuuaucugauuacuuugagagccaucaccagcgacuaugucguaguggguaaagcugcacggaauccauugcacuccggauuucacuaggugcagcaucaaag

SEQ ID NO: 1029 - RNA, 103 nt, Artificial Sequence
  variant guide RNA
acuggcgcuuuuaucugauuacuuugagagccaucaccagcgacuaugucguaguggguaaagcugcacaugcaugucuaagacagcaugugcagcaucaaag

SEQ ID NO: 1030 - RNA, 106 nt, Artificial Sequence
  variant guide RNA
acuggcgcuuuuaucugauuacuuugagagccaucaccagcgacuaugucguaguggguaaagcugcacaaaacauaaggaaaaccuauguugugcagcaucaaag

SEQ ID NO: 1031 - RNA, 153 nt, Artificial Sequence
  variant guide RNA
acuggcgcuucuaucugauuacucugagcgccaucaccagcgacuaugucguaguggguaaagccgcuuacggacuaugggcgcagcgucaaugacgcugacgguacaggccagacaauuauugucugguauaguccguaagaggcaucagag

SEQ ID NO: 1032 - RNA, 147 nt, Artificial Sequence
  variant guide RNA
acuggcgcuucuaucugauuacucugagcgccaucaccagcgacuaugucguaguggguaaagccgcuuacgggugggcgcagcgucaaugacgcugacgguacaggccagacaauuauugucugguacccguaagaggcaucagag

SEQ ID NO: 1033 - RNA, 157 nt, Artificial Sequence
  variant guide RNA
acuggcgcuucuaucugauuacucugagcgccaucaccagcgacuaugucguaguggguaaagccgcuuacggacuaugggcgcagcgucaaugacgcugacgguacaggccacaugaggaucacccaugugguauaguccguaagaggcaucagag

SEQ ID NO: 1034 - RNA, 143 nt, Artificial Sequence
  variant guide RNA
acuggcgcuuuuaucugauuacuuugagagccaucaccagcgacuaugucguaguggguaaagcucccuaugggcgcagcgucaaugacgcugacgguacaggccacaugaggaucacccaugugguauagggagcaucaaag

SEQ ID NO: 1035 - RNA, 167 nt, Artificial Sequence
  variant guide RNA
acuggcgcuucuaucugauuacucugagcgccaucaccagcgacuaugucguaguggguaaagccgcuuacggacuaugggcgcagcucaugaggaucacccaugagcugacgguacaggccacaugaggaucacccaugugguauaguccguaagaggcaucagag

SEQ ID NO: 1036 - RNA, 153 nt, Artificial Sequence
  variant guide RNA
acuggcgcuuuuaucugauuacuuugagagccaucaccagcgacuaugucguaguggguaaagcucccuaugggcgcagcucaugaggaucacccaugagcugacgguacaggccacaugaggaucacccaugugguauagggagcaucaaag

SEQ ID NO: 1037 - RNA, 163 nt, Artificial Sequence
  variant guide RNA
acuggcgcuucuaucugauuacucugagcgccaucaccagcgacuaugucguaguggguaaagccgcuuacggacuaugggcgcagcgucaaugacgcugacgguacaggccacauggcagucguaacgacgcgggugguauaguccguaagaggcaucagag

SEQ ID NO: 1038 - RNA, 149 nt, Artificial Sequence
  variant guide RNA
acuggcgcuuuuaucugauuacuuugagagccaucaccagcgacuaugucguaguggguaaagcucccuaugggcgcagcgucaaugacgcugacgguacaggccacauggcagucguaacgacgcgggugguauagggagcaucaaag

SEQ ID NO: 1039 - RNA, 184 nt, Artificial Sequence
  variant guide RNA
acuggcgcuucuaucugauuacucugagcgccaucaccagcgacuaugucguaguggguaaagccgcuuacggacuaugggcgcagcaaacauggcaguccuaaggacgcggguuuugcugacgguacaggccacauggcagucguaacgacgcgggugguauaguccguaagaggcaucagag

SEQ ID NO: 1040 - RNA, 170 nt, Artificial Sequence
  variant guide RNA
acuggcgcuuuuaucugauuacuuugagagccaucaccagcgacuaugucguaguggguaaagcucccuaugggcgcagcaaacauggcaguccuaaggacgcggguuuugcugacgguacaggccacauggcagucguaacgacgcgggugguauagggagcaucaaag

SEQ ID NO: 1041 - RNA, 171 nt, Artificial Sequence
  variant guide RNA
acuggcgcuucuaucugauuacucugagcgccaucaccagcgacuaugucguaguggguaaagccgcuuacggacuaugggcgcagacauggcagucguaacgacgcgggucugacgguacaggccacaugaggaucacccaugugguauaguccguaagaggcaucagag

SEQ ID NO: 1042 - RNA, 157 nt, Artificial Sequence
  variant guide RNA
acuggcgcuuuuaucugauuacuuugagagccaucaccagcgacuaugucguaguggguaaagcucccuaugggcgcagacauggcagucguaacgacgcgggucugacgguacaggccacaugaggaucacccaugugguauagggagcaucaaag

SEQ ID NO: 1043 - RNA, 155 nt, Artificial Sequence
  variant guide RNA
acuggcgcuuuuaucugauuacuuugagagccaucaccagcgacuaugucguaguggguaaagcugcacuaugggcgcagcaccugaggaucacccaggugcugacgguacaggccaccugaggaucacccaggugguauagugcagcaucaaag

SEQ ID NO: 1044 - RNA, 155 nt, Artificial Sequence
  variant guide RNA
acuggcgcuuuuaucugauuacuuugagagccaucaccagcgacuaugucguaguggguaaagcugcacuaugggcgcagcgcaugaggaucacccaugcgcugacgguacaggccgcaugaggaucacccaugcgguauagugcagcaucaaag

SEQ ID NO: 1045 - RNA, 155 nt, Artificial Sequence
  variant guide RNA
acuggcgcuuuuaucugauuacuuugagagccaucaccagcgacuaugucguaguggguaaagcugcacuaugggcgcagcgccugaggaucacccaggcgcugacgguacaggccgccugaggaucacccaggcgguauagugcagcaucaaag

SEQ ID NO: 1046 - RNA, 155 nt, Artificial Sequence
  variant guide RNA
acuggcgcuuuuaucugauuacuuugagagccaucaccagcgacuaugucguaguggguaaagcugcacuaugggcgcagcgccugagcaucagccaggcgcugacgguacaggccgccugagcaucagccaggcgguauagugcagcaucaaag

SEQ ID NO: 1047 - RNA, 155 nt, Artificial Sequence
  variant guide RNA
acuggcgcuuuuaucugauuacuuugagagccaucaccagcgacuaugucguaguggguaaagcugcacuaugggcgcagcacaugagcaucagccaugugcugacgguacaggccacaugagcaucagccaugugguauagugcagcaucaaag

SEQ ID NO: 1048 - RNA, 155 nt, Artificial Sequence
  variant guide RNA
acuggcgcuuuuaucugauuacuuugagagccaucaccagcgacuaugucguaguggguaaagcugcacuaugggcgcagcacaugaguaucaaccaugugcugacgguacaggccacaugaguaucaaccaugugguauagugcagcaucaaag

SEQ ID NO: 1049 - RNA, 155 nt, Artificial Sequence
  variant guide RNA
acuggcgcuuuuaucugauuacuuugagagccaucaccagcgacuaugucguaguggguaaagcugcacuaugggcgcagcacaugagaaucagccaugugcugacgguacaggccacaugagaaucagccaugugguauagugcagcaucaaag

SEQ ID NO: 1050 - RNA, 155 nt, Artificial Sequence
  variant guide RNA
acuggcgcuuuuaucugauuacuuugagagccaucaccagcgacuaugucguaguggguaaagcugcacuaugggcgcagcccuugaggaucacccaugugcugacgguacaggccccuugaggaucacccaugugguauagugcagcaucaaag

SEQ ID NO: 1051 - RNA, 155 nt, Artificial Sequence
  variant guide RNA
acuggcgcuuuuaucugauuacuuugagagccaucaccagcgacuaugucguaguggguaaagcugcacuaugggcgcagcacuugaggaucacccaugugcugacgguacaggccacuugaggaucacccaugugguauagugcagcaucaaag

SEQ ID NO: 1052 - RNA, 155 nt, Artificial Sequence
  variant guide RNA
acuggcgcuuuuaucugauuacuuugagagccaucaccagcgacuaugucguaguggguaaagcugcacuaugggcgcagcaccugaggaucacccaugugcugacgguacaggccaccugaggaucacccaugugguauagugcagcaucaaag

SEQ ID NO: 1053 - RNA, 155 nt, Artificial Sequence
  variant guide RNA
acuggcgcuuuuaucugauuacuuugagagccaucaccagcgacuaugucguaguggguaaagcugcacuaugggcgcagcacaugaggaucaccuaugugcugacgguacaggccacaugaggaucaccuaugugguauagugcagcaucaaag

SEQ ID NO: 1054 - RNA, 155 nt, Artificial Sequence
  variant guide RNA
acuggcgcuuuuaucugauuacuuugagagccaucaccagcgacuaugucguaguggguaaagcugcacuaugggcgcagcacauuaggaucaccaaugugcugacgguacaggccacauuaggaucaccaaugugguauagugcagcaucaaag

SEQ ID NO: 1055 - RNA, 155 nt, Artificial Sequence
  variant guide RNA
acuggcgcuuuuaucugauuacuuugagagccaucaccagcgacuaugucguaguggguaaagcugcacuaugggcgcagcacauuaggaucaccgaugugcugacgguacaggccacauuaggaucaccgaugugguauagugcagcaucaaag

SEQ ID NO: 1056 - RNA, 155 nt, Artificial Sequence
  variant guide RNA
acuggcgcuuuuaucugauuacuuugagagccaucaccagcgacuaugucguaguggguaaagcugcacuaugggcgcagcacauuaggaucaccuaugugcugacgguacaggccacauuaggaucaccuaugugguauagugcagcaucaaag

SEQ ID NO: 1057 - RNA, 155 nt, Artificial Sequence
  variant guide RNA
acuggcgcuuuuaucugauuacuuugagagccaucaccagcgacuaugucguaguggguaaagcugcacuaugggcgcagcacaugaggauuacccaugugcugacgguacaggccacaugaggauuacccaugugguauagugcagcaucaaag

SEQ ID NO: 1058 - RNA, 155 nt, Artificial Sequence
  variant guide RNA
acuggcgcuuuuaucugauuacuuugagagccaucaccagcgacuaugucguaguggguaaagcugcacuaugggcgcagcacaugaggauaacccaugugcugacgguacaggccacaugaggauaacccaugugguauagugcagcaucaaag

SEQ ID NO: 1059 - RNA, 155 nt, Artificial Sequence
  variant guide RNA
acuggcgcuuuuaucugauuacuuugagagccaucaccagcgacuaugucguaguggguaaagcugcacuaugggcgcagcacaugaggaugacccaugugcugacgguacaggccacaugaggaugacccaugugguauagugcagcaucaaag

SEQ ID NO: 1060 - RNA, 155 nt, Artificial Sequence
  variant guide RNA
acuggcgcuuuuaucugauuacuuugagagccaucaccagcgacuaugucguaguggguaaagcugcacuaugggcgcagcacaugaggaccacccaugugcugacgguacaggccacaugaggaccacccaugugguauagugcagcaucaaag

SEQ ID NO: 1061 - RNA, 155 nt, Artificial Sequence
  variant guide RNA
acuggcgcuuuuaucugauuacuuugagagccaucaccagcgacuaugucguaguggguaaagcugcacuaugggcgcagcagaugaggaucacccaugggcugacgguacaggccagaugaggaucacccaugggguauagugcagcaucaaag

SEQ ID NO: 1062 - RNA, 155 nt, Artificial Sequence
  variant guide RNA
acuggcgcuuuuaucugauuacuuugagagccaucaccagcgacuaugucguaguggguaaagcugcacuaugggcgcagcacauggggaucacccaugugcugacgguacaggccacauggggaucacccaugugguauagugcagcaucaaag

SEQ ID NO: 1063 - RNA, 155 nt, Artificial Sequence
  variant guide RNA
acuggcgcuuuuaucugauuacuuugagagccaucaccagcgacuaugucguaguggguaaagcugcacuaugggcgcagcacaugaggaucacccaugugcugacgguacaggccacaugaggaucacccaugugguauagugcagcaucaaag

SEQ ID NO: 1064 - RNA, 96 nt, Artificial Sequence
  variant guide RNA
acuggcgcuuuuaucugauuacuuugagagccaucaccagcgacuaugucguaguggguaaagcucaccugaggaucacccaggugagcaucaaag

SEQ ID NO: 1065 - RNA, 96 nt, Artificial Sequence
  variant guide RNA
acuggcgcuuuuaucugauuacuuugagagccaucaccagcgacuaugucguaguggguaaagcucgcaugaggaucacccaugcgagcaucaaag

SEQ ID NO: 1066 - RNA, 96 nt, Artificial Sequence
  variant guide RNA
acuggcgcuuuuaucugauuacuuugagagccaucaccagcgacuaugucguaguggguaaagcucgccugaggaucacccaggcgagcaucaaag

SEQ ID NO: 1067 - RNA, 96 nt, Artificial Sequence
  variant guide RNA
acuggcgcuuuuaucugauuacuuugagagccaucaccagcgacuaugucguaguggguaaagcucgccugagcaucagccaggcgagcaucaaag

SEQ ID NO: 1068 - RNA, 96 nt, Artificial Sequence
  variant guide RNA
acuggcgcuuuuaucugauuacuuugagagccaucaccagcgacuaugucguaguggguaaagcucacaugagcaucagccaugugagcaucaaag

SEQ ID NO: 1069 - RNA, 96 nt, Artificial Sequence
  variant guide RNA
acuggcgcuuuuaucugauuacuuugagagccaucaccagcgacuaugucguaguggguaaagcucacaugaguaucaaccaugugagcaucaaag

SEQ ID NO: 1070 - RNA, 96 nt, Artificial Sequence
  variant guide RNA
acuggcgcuuuuaucugauuacuuugagagccaucaccagcgacuaugucguaguggguaaagcucacaugagaaucagccaugugagcaucaaag

SEQ ID NO: 1071 - RNA, 96 nt, Artificial Sequence
  variant guide RNA
acuggcgcuuuuaucugauuacuuugagagccaucaccagcgacuaugucguaguggguaaagcucccuugaggaucacccaugugagcaucaaag

SEQ ID NO: 1072 - RNA, 96 nt, Artificial Sequence
  variant guide RNA
acuggcgcuuuuaucugauuacuuugagagccaucaccagcgacuaugucguaguggguaaagcucacuugaggaucacccaugugagcaucaaag

SEQ ID NO: 1073 - RNA, 96 nt, Artificial Sequence
  variant guide RNA
acuggcgcuuuuaucugauuacuuugagagccaucaccagcgacuaugucguaguggguaaagcucaccugaggaucacccaugugagcaucaaag

SEQ ID NO: 1074 - RNA, 96 nt, Artificial Sequence
  variant guide RNA
acuggcgcuuuuaucugauuacuuugagagccaucaccagcgacuaugucguaguggguaaagcucacaugaggaucaccuaugugagcaucaaag

SEQ ID NO: 1075 - RNA, 96 nt, Artificial Sequence
  variant guide RNA
acuggcgcuuuuaucugauuacuuugagagccaucaccagcgacuaugucguaguggguaaagcucacauuaggaucaccaaugugagcaucaaag

SEQ ID NO: 1076 - RNA, 96 nt, Artificial Sequence
  variant guide RNA
acuggcgcuuuuaucugauuacuuugagagccaucaccagcgacuaugucguaguggguaaagcucacauuaggaucaccgaugugagcaucaaag

SEQ ID NO: 1077 - RNA, 96 nt, Artificial Sequence
  variant guide RNA
acuggcgcuuuuaucugauuacuuugagagccaucaccagcgacuaugucguaguggguaaagcucacauuaggaucaccuaugugagcaucaaag

SEQ ID NO: 1078 - RNA, 96 nt, Artificial Sequence
  variant guide RNA
acuggcgcuuuuaucugauuacuuugagagccaucaccagcgacuaugucguaguggguaaagcucacaugaggauuacccaugugagcaucaaag

SEQ ID NO: 1079 - RNA, 96 nt, Artificial Sequence
  variant guide RNA
acuggcgcuuuuaucugauuacuuugagagccaucaccagcgacuaugucguaguggguaaagcucacaugaggauaacccaugugagcaucaaag

SEQ ID NO: 1080 - RNA, 96 nt, Artificial Sequence
  variant guide RNA
acuggcgcuuuuaucugauuacuuugagagccaucaccagcgacuaugucguaguggguaaagcucacaugaggaugacccaugugagcaucaaag

SEQ ID NO: 1081 - RNA, 96 nt, Artificial Sequence
  variant guide RNA
acuggcgcuuuuaucugauuacuuugagagccaucaccagcgacuaugucguaguggguaaagcucacaugaggaccacccaugugagcaucaaag

SEQ ID NO: 1082 - RNA, 96 nt, Artificial Sequence
  variant guide RNA
acuggcgcuuuuaucugauuacuuugagagccaucaccagcgacuaugucguaguggguaaagcucagaugaggaucacccaugggagcaucaaag

SEQ ID NO: 1083 - RNA, 96 nt, Artificial Sequence
  variant guide RNA
acuggcgcuuuuaucugauuacuuugagagccaucaccagcgacuaugucguaguggguaaagcucacauggggaucacccaugugagcaucaaag

SEQ ID NO: 1084 - RNA, 96 nt, Artificial Sequence
  variant guide RNA
acuggcgcuucuaucugauuacucugagcgccaucaccagcgacuaugucguaguggguaaagcucacaugaggaucacccaugugagcaucagag

SEQ ID NO: 1085 - RNA, 145 nt, Artificial Sequence
  variant guide RNA
acuggcgcuucuaucugauuacucugagcgccaucaccagcgacuaugucguaguggguaaagcugcacuaugggcgcagcgucaaugacgcugacgguacaggccacaugaggaucacccaugugguauagugcagcaucagag

SEQ ID NO: 1086 - RNA, 155 nt, Artificial Sequence
  variant guide RNA
acuggcgcuucuaucugauuacucugagcgccaucaccagcgacuaugucguaguggguaaagcugcacuaugggcgcagcucaugaggaucacccaugagcugacgguacaggccacaugaggaucacccaugugguauagugcagcaucagag

SEQ ID NO: 1087 - RNA, 99 nt, Artificial Sequence
  variant guide RNA
acugggccuucuaucugauuacucugaggcccaucaccagcgacuaugucguaguggguaaagccgcuuagggacuucggucccuaagaggcaucagag

SEQ ID NO: 1088 - RNA, 97 nt, Artificial Sequence
  variant guide RNA
acugggccuucuaucugauuacucugaggcccaucaccagcgacuaugucguaguggguaaagcccuuagggacuucggucccuaagggcaucagag

SEQ ID NO: 1089 - RNA, 99 nt, Artificial Sequence
  variant guide RNA
acugggccuucuaucugauuacucugaggcccaucaccagcgacuaugucguaguggguaaagccucuuagggacuucggucccuaagaggcaucagag

SEQ ID NO: 1090 - RNA, 89 nt, Artificial Sequence
  variant guide RNA
acugggccuucuaucugauuacucugaggcccaucaccagcgacuaugucguaguggguaaagcucccucuucggagggagcaucagag

SEQ ID NO: 1091 - RNA, 97 nt, Artificial Sequence
  variant guide RNA
acugggccuucuaucugauuacucugaggcccaucaccagcgacuaugucguaguggguaaagcccuuagggaccuuggucccuaagggcaucagag

SEQ ID NO: 1092 - RNA, 99 nt, Artificial Sequence
  variant guide RNA
acugggccuucuaucugauuacucugaggcccaucaccagcgacuaugucguaguggguaaagccucuuagggaccuuggucccuaagaggcaucagag

SEQ ID NO: 1093 - RNA, 89 nt, Artificial Sequence
  variant guide RNA
acugggccuucuaucugauuacucugaggcccaucaccagcgacuaugucguaguggguaaagcucccuccuuggagggagcaucagag

SEQ ID NO: 1094 - RNA, 97 nt, Artificial Sequence
  variant guide RNA
acugggccuucuaucugauuacucugaggcccaucaccagcgacuaugucguaguggguaaagcccuuagggaggaaacucccuaagggcaucagag

SEQ ID NO: 1095 - RNA, 99 nt, Artificial Sequence
  variant guide RNA
acugggccuucuaucugauuacucugaggcccaucaccagcgacuaugucguaguggguaaagccucuuagggaggaaacucccuaagaggcaucagag

SEQ ID NO: 1096 - RNA, 89 nt, Artificial Sequence
  variant guide RNA
acugggccuucuaucugauuacucugaggcccaucaccagcgacuaugucguaguggguaaagcucccuggaaacagggagcaucagag

SEQ ID NO: 1097 - RNA, 98 nt, Artificial Sequence
  variant guide RNA
acugggccuucuaucugauuacucugaggcccaucaccagcgacuaugucguaguggguaaagcccuuagggacuucaggucccuaagggcaucagag

SEQ ID NO: 1098 - RNA, 100 nt, Artificial Sequence
  variant guide RNA
acugggccuucuaucugauuacucugaggcccaucaccagcgacuaugucguaguggguaaagccucuuagggacuucaggucccuaagaggcaucagag

SEQ ID NO: 1099 - RNA, 90 nt, Artificial Sequence
  variant guide RNA
acugggccuucuaucugauuacucugaggcccaucaccagcgacuaugucguaguggguaaagcucccucuucaggagggagcaucagag

SEQ ID NO: 1100 - RNA, 97 nt, Artificial Sequence
  variant guide RNA
acugggccuucuaucugauuacucugaggcccaucaccaggcacuaugugcuaguggguaaagcccuuagggaccuuggucccuaagggcaucagag

SEQ ID NO: 1101 - RNA, 99 nt, Artificial Sequence
  variant guide RNA
acugggccuucuaucugauuacucugaggcccaucaccaggcacuaugugcuaguggguaaagccucuuagggaccuuggucccuaagaggcaucagag

SEQ ID NO: 1102 - RNA, 89 nt, Artificial Sequence
  variant guide RNA
acugggccuucuaucugauuacucugaggcccaucaccaggcacuaugugcuaguggguaaagcucccuccuuggagggagcaucagag

SEQ ID NO: 1103 - RNA, 97 nt, Artificial Sequence
  variant guide RNA
acugggccuucuaucugauuacucugaggcccaucaccaggcacuaugugcuaguggguaaagcccuuagggaggaaacucccuaagggcaucagag

SEQ ID NO: 1104 - RNA, 99 nt, Artificial Sequence
  variant guide RNA
acugggccuucuaucugauuacucugaggcccaucaccaggcacuaugugcuaguggguaaagccucuuagggaggaaacucccuaagaggcaucagag

SEQ ID NO: 1105 - RNA, 89 nt, Artificial Sequence
  variant guide RNA
acugggccuucuaucugauuacucugaggcccaucaccaggcacuaugugcuaguggguaaagcucccuggaaacagggagcaucagag

SEQ ID NO: 1106 - RNA, 98 nt, Artificial Sequence
  variant guide RNA
acugggccuucuaucugauuacucugaggcccaucaccaggcacuaugugcuaguggguaaagcccuuagggacuucaggucccuaagggcaucagag

SEQ ID NO: 1107 - RNA, 100 nt, Artificial Sequence
  variant guide RNA
acugggccuucuaucugauuacucugaggcccaucaccaggcacuaugugcuaguggguaaagccucuuagggacuucaggucccuaagaggcaucagag

SEQ ID NO: 1108 - RNA, 90 nt, Artificial Sequence
  variant guide RNA
acugggccuucuaucugauuacucugaggcccaucaccaggcacuaugugcuaguggguaaagcucccucuucaggagggagcaucagag

SEQ ID NO: 1109 - RNA, 96 nt, Artificial Sequence; identical to SEQ ID NO: 1084
  variant guide RNA

SEQ ID NO: 1110 - RNA, 145 nt, Artificial Sequence; identical to SEQ ID NO: 1085
  variant guide RNA

SEQ ID NO: 1111 - RNA, 155 nt, Artificial Sequence; identical to SEQ ID NO: 1086
  variant guide RNA

SEQ ID NO: 1112 - RNA, 159 nt, Artificial Sequence
  variant guide RNA
acuggcgcuucuaucugauuacucugagcgccaucaccagcgacuaugucguaguggguaaagcugcacuaugggcgcagacauggcagucguaacgacgcgggucugacgguacaggccacaugaggaucacccaugugguauagugcagcaucagag

SEQ ID NO: 1113 - RNA, 145 nt, Artificial Sequence
  variant guide RNA
acuggcgcuuuuaucugauuacuuugagagccaucaccagcgacuaugucguaguggguaaagcugcacuauggggccacaugaggaucacccaugugguguacagcgcagcgucaaugacgcugacgauagugcagcaucaaag

SEQ ID NO: 1114 - RNA, 436 nt, Artificial Sequence
  variant guide RNA
acuggcgcuuuuaucugauuacuuugagagccaucaccagcgacuaugucguaguggguaaagcugcacuaugggcgcagcucaugaggaucacccaugagcugacgguacaggccacaugaggaucacccaugugguauagugcagcaucaaagcugcauucuaguugugguuucacaauuauucuugaguguagucucgucauucaccaaaucuuuguuuggugcgcgcggccggcauggucccagccuccucgcuggcgccggcugggcaacauuccgaggggaccguccccucgguaauggcgaaugggacgucgacugcuaacaaagcccgaaaggaagcugaguuggcugcugccaccgcugagcaauaacuagcauaaccccuuggggccucuaaacgggucuugagggguuuuuugcugauuuuuuuu

SEQ ID NO: 1115 - RNA, 272 nt, Artificial Sequence
  variant guide RNA
acuggcgcuuuuaucugauuacuuugagagccaucaccagcgacuaugucguaguggguaaagcugcacuaugggcgcagcucaugaggaucacccaugagcugacgguacaggccacaugaggaucacccaugugguauagugcagcaucaaagcugcauucuaguugugguuuauggccggcauggucccagccuccucgcuggcgccggcugggcaacauuccgaggggaccgcccccucgguaauggcgaaugggacccauuuuuuuu

SEQ ID NO: 1116 - RNA, 271 nt, Artificial Sequence
  variant guide RNA
acuggcgcuuuuaucugauuacuuugagagccaucaccagcgacuaugucguaguggguaaagcugcacuaugggcgcagcucaugaggaucacccaugagcugacgguacaggccacaugaggaucacccaugugguauagugcagcaucaaagcugcauucuaguugugguuuguggccggcaugguccagccuacucgcuggcgcgggcugggcaacauuccgaggggacccgucccucgguaauggcgaaugggacccauuuuuuuu

SEQ ID NO: 1117 - RNA, 274 nt, Artificial Sequence
  variant guide RNA
acuggcgcuuuuaucugauuacuuugagagccaucaccagcgacuaugucguaguggguaaagcugcacuaugggcgcagcucaugaggaucacccaugagcugacgguacaggccacaugaggaucacccaugugguauagugcagcaucaaagcugcauucuaguugugguuuguggccggcauggccccagccuccucgcuggcgccggcugggcaacgauccgaggggacugucccucucgagaaucggcaaauggggccccuuuuuuuu

SEQ ID NO: 1118 - RNA, 283 nt, Artificial Sequence
  variant guide RNA
acuggcgcuuuuaucugauuacuuugagagccaucaccagcgacuaugucguaguggguaaagcugcacuaugggcgcagcucaugaggaucacccaugagcugacgguacaggccacaugaggaucacccaugugguauagugcagcaucaaagcugcauucuaguugugguuuucgggucggcauggcaucuccaccuccaccuccucgcgguccgaccugggcauccgaaggaggagcggacguccacucggauggcuaagggagagcccaguuuuuuuu

SEQ ID NO: 1119 - RNA, 276 nt, Artificial Sequence
  variant guide RNA
acuggcgcuuuuaucugauuacuuugagagccaucaccagcgacuaugucguaguggguaaagcugcacuaugggcgcagcucaugaggaucacccaugagcugacgguacaggccacaugaggaucacccaugugguauagugcagcaucaaagcugcauucuaguugugguuuucgggucggcauggcaucuccaccuccccgugguccgaccugggcauccgaaggaggacggacguccacucggauggcuaagggagugccggcuuuuuuuu

SEQ ID NO: 1120 - RNA, 251 nt, Artificial Sequence
  variant guide RNA
acuggcgcuuuuaucugauuacuuugagagccaucaccagcgacuaugucguaguggguaaagcugcacuaugggcgcagcucaugaggaucacccaugagcugacgguacaggccacaugaggaucacccaugugguauagugcagcaucaaagcugcauucuaguugugguuuggccggcauggucccagccuccucgcuggcgccggcugggcaacaugcuucggcauggcgaaugggacuuuuuuuu

SEQ ID NO: 1121 - RNA, 377 nt, Artificial Sequence
  variant guide RNA
acuggcgcuuuuaucugauuacuuugagagccaucaccagcgacuaugucguaguggguaaagcucacaugaggaucacccaugugagcaucaaagcugcauucuaguugugguuucacaauuauucuugaguguagucucgucauucaccaaaucuuuguuuggugcgcgcggccggcauggucccagccuccucgcuggcgccggcugggcaacauuccgaggggaccguccccucgguaauggcgaaugggacgucgacugcuaacaaagcccgaaaggaagcugaguuggcugcugccaccgcugagcaauaacuagcauaaccccuuggggccucuaaacgggucuugagggguuuuuugcugauuuuuuuu

SEQ ID NO: 1122 - RNA, 213 nt, Artificial Sequence
  variant guide RNA
acuggcgcuuuuaucugauuacuuugagagccaucaccagcgacuaugucguaguggguaaagcucacaugaggaucacccaugugagcaucaaagcugcauucuaguugugguuuauggccggcauggucccagccuccucgcuggcgccggcugggcaacauuccgaggggaccgcccccucgguaauggcgaaugggacccauuuuuuuu

SEQ ID NO: 1123 - RNA, 212 nt, Artificial Sequence
  variant guide RNA
acuggcgcuuuuaucugauuacuuugagagccaucaccagcgacuaugucguaguggguaaagcucacaugaggaucacccaugugagcaucaaagcugcauucuaguugugguuuguggccggcaugguccagccuacucgcuggcgcgggcugggcaacauuccgaggggacccgucccucgguaauggcgaaugggacccauuuuuuuu

SEQ ID NO: 1124 - RNA, 215 nt, Artificial Sequence
  variant guide RNA
acuggcgcuuuuaucugauuacuuugagagccaucaccagcgacuaugucguaguggguaaagcucacaugaggaucacccaugugagcaucaaagcugcauucuaguugugguuuguggccggcauggccccagccuccucgcuggcgccggcugggcaacgauccgaggggacugucccucucgagaaucggcaaauggggccccuuuuuuuu

SEQ ID NO: 1125 - RNA, 224 nt, Artificial Sequence
  variant guide RNA
acuggcgcuuuuaucugauuacuuugagagccaucaccagcgacuaugucguaguggguaaagcucacaugaggaucacccaugugagcaucaaagcugcauucuaguugugguuuucgggucggcauggcaucuccaccuccaccuccucgcgguccgaccugggcauccgaaggaggagcggacguccacucggauggcuaagggagagcccaguuuuuuuu

SEQ ID NO: 1126 - RNA, 217 nt, Artificial Sequence
  variant guide RNA
acuggcgcuuuuaucugauuacuuugagagccaucaccagcgacuaugucguaguggguaaagcucacaugaggaucacccaugugagcaucaaagcugcauucuaguugugguuuucgggucggcauggcaucuccaccuccccgugguccgaccugggcauccgaaggaggacggacguccacucggauggcuaagggagugccggcuuuuuuuu

SEQ ID NO: 1127 - RNA, 192 nt, Artificial Sequence
  variant guide RNA
acuggcgcuuuuaucugauuacuuugagagccaucaccagcgacuaugucguaguggguaaagcucacaugaggaucacccaugugagcaucaaagcugcauucuaguugugguuuggccggcauggucccagccuccucgcuggcgccggcugggcaacaugcuucggcauggcgaaugggacuuuuuuuu

SEQ ID NO: 1128 - RNA, 163 nt, Artificial Sequence
  variant guide RNA
acuggcgcuuuuaucugauuacuuugagagccaucaccagcgacuaugucguaguggguaaagcugcacuaugggcgcagcaaggaguuuauauggaaacccuugcugacgguacaggccaaggaguuuauauggaaacccuugguauagugcagcaucaaag

SEQ ID NO: 1129 - RNA, 147 nt, Artificial Sequence
  variant guide RNA
acuggcgcuuuuaucugauuacuuugagagccaucaccagcgacuaugucguaguggguaaagcugcacuaugggcgcagcgcccugaagaagggcgcugacgguacaggccgcccugaagaagggcgguauagugcagcaucaaag

SEQ ID NO: 1130 - RNA, 173 nt, Artificial Sequence
  variant guide RNA
acuggcgcuuuuaucugauuacuuugagagccaucaccagcgacuaugucguaguggguaaagcugcacuaugggcgcagcggcucguguagcucauuagcuccgagccgcugacgguacaggccggcucguguagcucauuagcuccgagccgguauagugcagcaucaaag

SEQ ID NO: 1131 - RNA, 177 nt, Artificial Sequence
  variant guide RNA
acuggcgcuuuuaucugauuacuuugagagccaucaccagcgacuaugucguaguggguaaagcugcacuaugggcgcagcccgugugcauccgcagugucggauccacgggcugacgguacaggccccgugugcauccgcagugucggauccacgggguauagugcagcaucaaag

SEQ ID NO: 1132 - RNA, 161 nt, Artificial Sequence
  variant guide RNA
acuggcgcuuuuaucugauuacuuugagagccaucaccagcgacuaugucguaguggguaaagcugcacuaugggcgcagcauccauugcacuccggauagcugcugacgguacaggccauccauugcacuccggauagcugguauagugcagcaucaaag

SEQ ID NO: 1133 - RNA, 157 nt, Artificial Sequence
  variant guide RNA
acuggcgcuuuuaucugauuacuuugagagccaucaccagcgacuaugucguaguggguaaagcugcacuaugggcgcagcaugcaugucuaagacagcaugcugacgguacaggccaugcaugucuaagacagcaugguauagugcagcaucaaag

SEQ ID NO: 1134 - RNA, 162 nt, Artificial Sequence
  variant guide RNA
acuggcgcuuuuaucugauuacuuugagagccaucaccagcgacuaugucguaguggguaaagcugcacuaugggcgcagcaaaacauaaggaaaaccuauguucugacgguacaggccaaaacauaaggaaaaccuauguugguauagugcagcaucaaag

SEQ ID NO: 1135 - RNA, 175 nt, Artificial Sequence
  variant guide RNA
acuggcgcuucuaucugauuacucugagcgccaucaccagcgacuaugucguaguggguaaagccgcuuacggacuaugggcgcagcaaggaguuuauauggaaacccuugcugacgguacaggccaaggaguuuauauggaaacccuugguauaguccguaagaggcaucagag

SEQ ID NO: 1136 - RNA, 159 nt, Artificial Sequence
  variant guide RNA
acuggcgcuucuaucugauuacucugagcgccaucaccagcgacuaugucguaguggguaaagccgcuuacggacuaugggcgcagcgcccugaagaagggcgcugacgguacaggccgcccugaagaagggcgguauaguccguaagaggcaucagag

SEQ ID NO: 1137 - RNA, 185 nt, Artificial Sequence
  variant guide RNA
acuggcgcuucuaucugauuacucugagcgccaucaccagcgacuaugucguaguggguaaagccgcuuacggacuaugggcgcagcggcucguguagcucauuagcuccgagccgcugacgguacaggccggcucguguagcucauuagcuccgagccgguauaguccguaagaggcaucagag

SEQ ID NO: 1138 - RNA, 189 nt, Artificial Sequence
  variant guide RNA
acuggcgcuucuaucugauuacucugagcgccaucaccagcgacuaugucguaguggguaaagccgcuuacggacuaugggcgcagcccgugugcauccgcagugucggauccacgggcugacgguacaggccccgugugcauccgcagugucggauccacgggguauaguccguaagaggcaucagag

SEQ ID NO: 1139 - RNA, 173 nt, Artificial Sequence
  variant guide RNA
acuggcgcuucuaucugauuacucugagcgccaucaccagcgacuaugucguaguggguaaagccgcuuacggacuaugggcgcagcauccauugcacuccggauagcugcugacgguacaggccauccauugcacuccggauagcugguauaguccguaagaggcaucagag

SEQ ID NO: 1140 - RNA, 169 nt, Artificial Sequence
  variant guide RNA
acuggcgcuucuaucugauuacucugagcgccaucaccagcgacuaugucguaguggguaaagccgcuuacggacuaugggcgcagcaugcaugucuaagacagcaugcugacgguacaggccaugcaugucuaagacagcaugguauaguccguaagaggcaucagag

SEQ ID NO: 1141 - RNA, 175 nt, Artificial Sequence
  variant guide RNA
acuggcgcuucuaucugauuacucugagcgccaucaccagcgacuaugucguaguggguaaagccgcuuacggacuaugggcgcagcaaaacauaaggaaaaccuauguugcugacgguacaggccaaaacauaaggaaaaccuauguugguauaguccguaagaggcaucagag

SEQ ID NO: 1142 - protein, 511 aa, Vesicular stomatitis virus; identical to SEQ ID NO: 1

SEQ ID NO: 1143 - protein, 451 aa, Vesicular stomatitis virus
KFTIVFPHNQKGNWKNVPSNYHYCPSSSDLNWHNDLIGTALQVKMPKSHKAIQADGWMCHASKWVTTCDFRWYGPKYITHSIRSFTPSVEQCKESIEQTKQGTWLNPGFPPQSCGYATVTDAEAVIVQVTPHHVLVDEYTGEWVDSQFINGKCSNYICPTVHNSTTWHSDYKVKGLCDSNLISMDITFFSEDGELSSLGKEGTGFRSNYFAYETGGKACKMQYCKHWGVRLPSGVWFEMADKDLFAAARFPECPEGSSISAPSQTSVDVSLIQDVERILDYSLCQETWSKIRAGLPISPVDLSYLAPKNPGTGPAFTIINGTLKYFETRYIRVDIAAPILSRMVGMISGTTTERELWDDWAPYEDVEIGPNGVLRTSSGYKFPLYMIGHGMLDSDLHLSSKAQVFEHPHIQDAASQLPDDESLFFGDTGLSKNPIELVEGWFSSWKSSIAS

SEQ ID NO: 1144 - protein, 21 aa, Vesicular stomatitis virus
FFFIIGLIIGLFLVLRVGIHL

SEQ ID NO: 1145 - protein, 23 aa, Vesicular stomatitis virus
CIKLKHTKKRQIYTDIEMNRLGK

SEQ ID NO: 1146 - protein, 512 aa, Vesiculovirus Maraba vesiculovirus; identical to SEQ ID NO: 91

SEQ ID NO: 1147 - protein, 448 aa, Vesiculovirus Maraba vesiculovirus
KFTIVFPHHQKGNWKNVPSTYHYCPSSSDQNWHNDLTGVSLHVKIPKSHKAIQADGWMCHAAKWVTTCDFRWYGPKYITHSIHSMSPTLEQCKTSIEQTKQGVWINPGFPPQSCGYATVTDAEVVVVQATPHHVLVDEYTGEWIDSQLVGGKCSKEVCQTVHNSTVWHADYKITGLCESNLASVDITFFSEDGQKTSLGKPNTGFRSNHFAYESGEKACRMQYCTQWGIRLPSGVWFELVDKDLFQAAKLPECPRGSSISAPSQTSVDVSLIQDVERILDYSLCQETWSKIRAKLPVSPVDLSYLAPKNPGSGPAFTIINGTLKYFETRYIRVDISNPIIPHMVGTMSGTTTERELWNDWYPYEDVEIGPNGVLKTPTGFKFPLYMIGHGMLDSDLHKSSQAQVFEHPHAKDAASQLPDDETLFFGDTGLSKNPVELVEGWFSSWKST

SEQ ID NO: 1148 - protein, 22 aa, Vesiculovirus Maraba vesiculovirus
LASFFLIIGLGVALIFIIRIIV

SEQ ID NO: 1149 - protein, 26 aa, Vesiculovirus Maraba vesiculovirus
AIRYKYKGRKTQKIYNDVEMSRLGNK

SEQ ID NO: 1150 - protein, 512 aa, Vesiculovirus Cocal vesiculovirus; identical to SEQ ID NO: 86

SEQ ID NO: 1151 - protein, 451 aa, Vesiculovirus Cocal vesiculovirus
KFSIVFPQSQKGNWKNVPSSYHYCPSSSDQNWHNDLLGITMKVKMPKTHKAIQADGWMCHAAKWITTCDFRWYGPKYITHSIHSIQPTSEQCKESIKQTKQGTWMSPGFPPQNCGYATVTDSVAVVVQATPHHVLVDEYTGEWIDSQFPNGKCETEECETVHNSTVWYSDYKVTGLCDATLVDTEITFFSEDGKKESIGKPNTGYRSNYFAYEKGDKVCKMNYCKHAGVRLPSGVWFEFVDQDVYAAAKLPECPVGATISAPTQTSVDVSLILDVERILDYSLCQETWSKIRSKQPVSPVDLSYLAPKNPGTGPAFTIINGTLKYFETRYIRIDIDNPIISKMVGKISGSQTERELWTEWFPYEGVEIGPNGILKTPTGYKFPLFMIGHGMLDSDLHKTSQAEVFEHPHLAEAPKQLPEEETLFFGDTGISKNPVELIEGWFSSWKSTVVT

SEQ ID NO: 1152 - protein, 21 aa, Vesiculovirus Cocal vesiculovirus
FFFAIGVFILLYVVARIVIAV

SEQ ID NO: 1153 - protein, 23 aa, Vesiculovirus Cocal vesiculovirus
RYRYQGSNNKRIYNDIEMSRFRK

SEQ ID NO: 1154 - protein, 524 aa, Lyssavirus Rabies lyssavirus; identical to SEQ ID NO: 41

SEQ ID NO: 1155 - protein, 440 aa, Lyssavirus Rabies lyssavirus
KFPIYTILDKLGPWSPIDIHHLSCPNNLVVEDEGCTNLSGFSYMELKVGYILAIKMNGFTCTGVVTEAETYTNFVGYVTTTFKRKHFRPTPDACRAAYNWKMAGDPRYEESLHNPYPDYRWLRTVKTTKESLVIISPSVADLDPYDRSLHSRVFPSGKCSGVAVSSTYCSTNHDYTIWMPENPRLGMSCDIFTNSRGKRASKGSETCGFVDERGLYKSLKGACKLKLCGVLGLRLMDGTWVAMQTSNETKWCPPDQLVNLHDFRSDEIEHLVVEELVRKREECLDALESIMTTKSVSFRRLSHLRKLVPGFGKAYTIFNKTLMEADAHYKSVRTWNEILPSKGCLRVGGRCHPHVNGVFFNGIILGPDGNVLIPEMQSSLLQQHMELLESSVIPLVHPLADPSTVFKDGDEAEDFVEVHLPDVHNQVSGVDLGLPNWGKY

SEQ ID NO: 1156 - protein, 21 aa, Lyssavirus Rabies lyssavirus
VLLSAGALTALMLIIFLMTCC

SEQ ID NO: 1157 - protein, 44 aa, Lyssavirus Rabies lyssavirus
RRVNRSEPTQHNLRGTGREVSVTPQSGKIISSWESHKSGGETRL

SEQ ID NO: 1158 - protein, 1236 aa, Alphavirus Western equine encephalitis virus
MFPYPQLNFPPVYPTNPMAYRDPNPPRCRWRPFRPPLAAQIEDLRRSIANLTFKQRSPNPPPGPPPKKKKSAPKPKPTQPKKKKQQAKKTKRKPKPGKRQRMCMKLESDKTFPIMLNGQVNGYACVVGGRLMKPLHVEGKIDNEQLAAVKLKKASMYDLEYGDVPQNMKSDTLQYTSDKPPGFYNWHHGAVQYENGRFTVPRGVGGKGDSGRPILDNRGRVVAIVLGGANEGTRTALSVVTWNQKGVTIKDTPEGSEPWSLVTALCVLSNVTFPCDKPPVCYSLAPERTLDVLEENVDNPNYDTLLENVLKCPSRRPKRSITDDFTLTSPYLGFCPYCRHSAPCFSPIKIENVWDESDDGSIRIQVSAQFGYNQAGTADVTKFRYMSFDHDHDIKEDSMDKIAISTSGPCRRLGHKGYFLLAQCPPGDSVTVSITSGASENSCTVEKKIRRKFVGREEYLFPPVHGKLVKCHVYDHLKETSAGYITMHRPGPHAYKSYLEEASGEVYIKPPSGKNVTYECKCGDYSTGIVSTRTKMNGCTKAKQCIAYKSDQTKWVFNSPDLIRHTDHSVQGKLHIPFRLTPTVCPVPLAHTPTVTKWFKGITLHLTATRPTLLTTRKLGLRADATAEWITGTTSRNFSVGREGLEYVWGNHEPVRVWAQESAPGDPHGWPHEIIIHYYHRHPVYTVIVLCGVALAILVGTASSAACIAKARRDCLTPYALAPNATVPTALAVLCCIRPTNAETFGETLNHLWFNNQPFLWAQLCIPLAALVILFRCFSCCMPFLLVAGVCLGKVDAFEHATTVPNVPGIPYKALVERAGYAPLNLEITVVSSELTPSTNKEYVTCRFHTVIPSPQVKCCGSLECKASSKADYTCRVFGGVYPFMWGGAQCFCDSENTQLSEAYVEFAPDCTIDHAVALKVHTAALKVGLRIVYGNTTAHLDTFVNGVTPGSSRDLKVIAGPISAAFSPFDHKVVIRKGLVYNYDFPEYGAMKPGAFGDIQASSLDATDIVARTDIRLLKPSVKNIHVPYTQAVSGYEMWKNNSGRPLQETAPFGCKIEVEPLRASNCAYGHIPISIDIPDAAFVRSSESPTILEVSCTVADCIYSADFGGSLTLQYKADREGHCPVHSHSTTAVLKEATTHVTAVGSITLHFSTSSPQANFIVSLCGKKTTCNAECKPPADHIIGEPHKVDQEFQAAVSKTSWNWLLALFGGASSLIVVGLIVLVCSSMLINTRR

SEQ ID NO: 1159 - protein, 428 aa, Alphavirus Western equine encephalitis virus
SLVTALCVLSNVTFPCDKPPVCYSLAPERTLDVLEENVDNPNYDTLLENVLKCPSRRPKRSITDDFTLTSPYLGFCPYCRHSAPCFSPIKIENVWDESDDGSIRIQVSAQFGYNQAGTADVTKFRYMSFDHDHDIKEDSMDKIAISTSGPCRRLGHKGYFLLAQCPPGDSVTVSITSGASENSCTVEKKIRRKFVGREEYLFPPVHGKLVKCHVYDHLKETSAGYITMHRPGPHAYKSYLEEASGEVYIKPPSGKNVTYECKCGDYSTGIVSTRTKMNGCTKAKQCIAYKSDQTKWVFNSPDLIRHTDHSVQGKLHIPFRLTPTVCPVPLAHTPTVTKWFKGITLHLTATRPTLLTTRKLGLRADATAEWITGTTSRNFSVGREGLEYVWGNHEPVRVWAQESAPGDPHGWPHEIIIHYYHRHPVYTV

SEQ ID NO: 1160 - protein, 21 aa, Alphavirus Western equine encephalitis virus
IVLCGVALAILVGTASSAACI

SEQ ID NO: 1161 - protein, 34 aa, Alphavirus Western equine encephalitis virus
AKARRDCLTPYALAPNATVPTALAVLCCIRPTNA

SEQ ID NO: 1162 - protein, 25 aa, Alphavirus Western equine encephalitis virus
ETFGETLNHLWFNNQPFLWAQLCIP

SEQ ID NO: 1163 - protein, 21 aa, Alphavirus Western equine encephalitis virus
LAALVILFRCFSCCMPFLLVA

SEQ ID NO: 1164 - protein, 21 aa, Alphavirus Western equine encephalitis virus
GVCLGKVDAFEHATTVPNVPG

SEQ ID NO: 1165 - protein, 396 aa, Alphavirus Western equine encephalitis virus
IPYKALVERAGYAPLNLEITVVSSELTPSTNKEYVTCRFHTVIPSPQVKCCGSLECKASSKADYTCRVFGGVYPFMWGGAQCFCDSENTQLSEAYVEFAPDCTIDHAVALKVHTAALKVGLRIVYGNTTAHLDTFVNGVTPGSSRDLKVIAGPISAAFSPFDHKVVIRKGLVYNYDFPEYGAMKPGAFGDIQASSLDATDIVARTDIRLLKPSVKNIHVPYTQAVSGYEMWKNNSGRPLQETAPFGCKIEVEPLRASNCAYGHIPISIDIPDAAFVRSSESPTILEVSCTVADCIYSADFGGSLTLQYKADREGHCPVHSHSTTAVLKEATTHVTAVGSITLHFSTSSPQANFIVSLCGKKTTCNAECKPPADHIIGEPHKVDQEFQAAVSKTSWN

SEQ ID NO: 1166 - protein, 21 aa, Alphavirus Western equine encephalitis virus
WLLALFGGASSLIVVGLIVLV

SEQ ID NO: 1167 - protein, 10 aa, Alphavirus Western equine encephalitis virus
CSSMLINTRR

SEQ ID NO: 1168 - protein, 617 aa, Morbillivirus Measles morbillivirus
MSPQRDRINAFYKDNPHPKGSRIVINREHLMIDRPYVLLAVLFVMFLSLIGLLAIAGIRLHRAAIYTAEIHKSLSTNLDVTNSIEHQVKDVLTPLFKIIGDEVGLRTPQRFTDLVKFISDKIKFLNPDREYDFRDLTWCINPPERIKLDYDQYCADVAAEELMNALVNSTLLEARATNQFLAVSKGNCSGPTTIRGQFSNMSLSLLDLYLSRGYNVSSIVTMTSQGMYGGTYLVGKPNLSSKGSELSQLSMHRVFEVGVIRNPGLGAPVFHMTNYFEQPVSNDFSNCMVALGELKFAALCHREDSITIPYQGSGKGVSFQLVKLGVWKSPTDMRSWVPLSTDDPVIDRLYLSSHRGVIADNQAKWAVPTTRTDDKLRMETCFQQACKGKNQALCENPEWAPLKDNRIPSYGVLSVNLSLTVELKIKIASGFGPLITHGSGMDLYKTNHNNVYWLTIPPMKNLALGVINTLEWIPRFKVSPNLFTVPIKEAGEDCHAPTYLPAEVDGDVKLSSNLVILPGQDLQYVLATYDTSRVEHAVVYYVYSPSRSFSYFYPFRLPIKGVPIELQVECFTWDKKLWCRHFCVLADSESGGHITHSGMVGMGVSCTVTREDGTNRR

SEQ ID NO: 1169 - protein, 559 aa, Morbillivirus Measles morbillivirus
RLHRAAIYTAEIHKSLSTNLDVTNSIEHQVKDVLTPLFKIIGDEVGLRTPQRFTDLVKFISDKIKFLNPDREYDFRDLTWCINPPERIKLDYDQYCADVAAEELMNALVNSTLLEARATNQFLAVSKGNCSGPTTIRGQFSNMSLSLLDLYLSRGYNVSSIVTMTSQGMYGGTYLVGKPNLSSKGSELSQLSMHRVFEVGVIRNPGLGAPVFHMTNYFEQPVSNDFSNCMVALGELKFAALCHREDSITIPYQGSGKGVSFQLVKLGVWKSPTDMRSWVPLSTDDPVIDRLYLSSHRGVIADNQAKWAVPTTRTDDKLRMETCFQQACKGKNQALCENPEWAPLKDNRIPSYGVLSVNLSLTVELKIKIASGFGPLITHGSGMDLYKTNHNNVYWLTIPPMKNLALGVINTLEWIPRFKVSPNLFTVPIKEAGEDCHAPTYLPAEVDGDVKLSSNLVILPGQDLQYVLATYDTSRVEHAVVYYVYSPSRSFSYFYPFRLPIKGVPIELQVECFTWDKKLWCRHFCVLADSESGGHITHSGMVGMGVSCTVTREDGTNRR

SEQ ID NO: 1170 - protein, 21 aa, Morbillivirus Measles morbillivirus
LLAVLFVMFLSLIGLLAIAGI

SEQ ID NO: 1171 - protein, 37 aa, Morbillivirus Measles morbillivirus
MSPQRDRINAFYKDNPHPKGSRIVINREHLMIDRPYV

SEQ ID NO: 1172 - protein, 550 aa, Morbillivirus Measles morbillivirus; identical to SEQ ID NO: 110

SEQ ID NO: 1173 - protein, 471 aa, Morbillivirus Measles morbillivirus
QIHWGNLSKIGVVGIGSASYKVMTRSSHQSLVIKLMPNITLLNNCTRVEIAEYRRLLRTVLEPIRDALNAMTQNIRPVQSVASSRRHKRFAGVVLAGAALGVATAAQITAGIALHQSMLNSQAIDNLRASLETTNQAIEAIRQAGQEMILAVQGVQDYINNELIPSMNQLSCDLIGQKLGLKLLRYYTEILSLFGPSLRDPISAEISIQALSYALGGDINKVLEKLGYSGGDLLGILESRGIKARITHVDTESYFIVLSIAYPTLSEIKGVIVHRLEGVSYNIGSQEWYTTVPKYVATQGYLISNFDESSCTFMPEGTVCSQNALYPMSPLLQECLRGSTKSCARTLVSGSFGNRFILSQGNLIANCASILCKCYTTGTIINQDPDKILTYIAADHCPVVEVNGVTIQVGSRRYPDAVYLHRIDLGPPISLERLDVGTNLGNAIAKLEDAKELLESSDQILRSMKGLSSTS

SEQ ID NO: 1174 - protein, 21 aa, Morbillivirus Measles morbillivirus
IVYILIAVCLGGLIGIPALIC

SEQ ID NO: 1175 - protein, 35 aa, Morbillivirus Measles morbillivirus
CCRGRCNKKGEQVGMSRPGLKPDLTGTSKSYVRSL

SEQ ID NO: 1176 - DNA, 130 bp, Artificial Sequence
  AAV ITR
cctgcaggcagctgcgcgctcgctcgctcactgaggccgcccgggcgtcgggcgacctttggtcgcccggcctcagtgagcgagcgagcgcgcagagagggagtggccaactccatcactaggggttcct

SEQ ID NO: 1177 - DNA, 141 bp, Artificial Sequence
  AAV ITR
aggaacccctagtgatggagttggccactccctctctgcgcgctcgctcgctcactgaggccgggcgaccaaaggtcgcccgacgcccgggctttgcccgggcggcctcagtgagcgagcgagcgcgcagctgcctgcagg
